(19) United States
(12) Patent Application Publication
(10) Pub. No.: US 2023/0071283 A1
(43) Pub. Date: Mar. 9, 2023

(54) COMPOSITIONS AND METHODS FOR SELECTIVE PROTEIN EXPRESSION

(71) Applicants: Andrei Golosov, (US); Carla Patricia Pinto Guimaraes, (US); Gregory Motz, (US); Michael C. Milone, (US); Christoph T. Ellebrecht, (US); Aimee S. Payne, (US); Novartis AG; The Trustees of the University of Pennsylvania

(72) Inventors: Andrei Golosov, Cambridge, MA (US); Carla Patricia Pinto Guimaraes, Boston, MA (US); Gregory Motz, Quincy, MA (US); Michael C. Milone, Cherry Hill, NJ (US); Christoph T. Ellebrecht, Philadelphia, PA (US); Aimee S. Payne, Merion Station, PA (US)

(73) Assignees: Aimee S. Payne, Philadelphia, PA (US); Aimee S. Payne, Basel, PA (CH); Aimee S. Payne, Philadelphia, PA (US); Andrei Golosov, Cambridge, MA (US); Carla Patricia Pinto Guimaraes, Cambridge, MA (US); Gregory Patricia Pinto Motz, Quincy, MA (US); Michael C. Milone, Cherry Hill, NJ (US); Christoph T. Ellebrecht, Philadelphia, PA (US); Aimee S. Payne, Merion Station, PA (US)

(21) Appl. No.: 16/093,758

(22) PCT Filed: Apr. 14, 2017
(86) PCT No.: PCT/US17/27778

§ 371 Date: Oct. 15, 2018

(51) Int. Cl. C07K 14/725

(52) U.S. Cl. CPC C07K 14/7051; C07K 2319/50; A61K 38/00; C07K 2319/70; C07K 2319/95; C07K 2319/03

(57) ABSTRACT

Provided herein are fusion proteins including two protein domains separated by a heterologous protease cleavage site, wherein a first of the protein domains is a conditional expression domain. Thus, the fusion proteins comprise three essential elements: a conditional expression domain, a domain containing the protein of interest, and a protease cleavage domain separating the two. Also provided herein are methods for treating autoantibody and alloantibody-mediated diseases or conditions in a subject by targeting B cells with anti-B cell modified T cells. In one embodiment, a chimeric antigen receptor (CAR) modified T cell is selectively ablated in a subject after adoptive transfer. Pharmaceutical compositions comprising the temporally regulated CAR modified T cell are also described herein.

### RELATED APPLICATIONS

[0001] This application is a U.S. National Stage Application under 35 U.S.C. § 371 of International Application No. PCT/US2017/027778, filed Apr. 14, 2017, which claims priority to provisional U.S. Ser. No. 62/322,931, filed Apr. 15, 2016, and U.S. Ser. No. 62/481,094 filed Apr. 3, 2017, the entire contents of each of these applications is incorporated herein by reference.

### GOVERNMENT SUPPORT

[0002] This invention was made with government support under grant number RO1 AR068288 awarded by the National Institutes of Health. The government has certain rights in the invention.

### SEQUENCE LISTING

[0003] The instant application contains a Sequence Listing which has been submitted electronically in ASCII format and is hereby incorporated by reference in its entirety. Said ASCII copy, created on Apr. 14, 2017, is named N2067-7128WO_SL.txt and is 2,326,027 bytes in size.

### BACKGROUND OF THE INVENTION

[0004] A variety of constructs have been developed to enable selective expression of a desired protein of interest. Recent constructs have been tested which incorporate a domain engineered to degrade in the absence of a stabilizing ligand (known in the art as “degrons”). Other constructs incorporate a domain engineered to aggregate in the absence of a deaggregating ligand (e.g., an aggregation domain). Such domains can be fused to proteins of interest to permit selective expression of such proteins only in the presence of the stabilizing or deaggregating ligand.

[0005] Degrons and aggregation domains known in the art can, in certain circumstances, have certain disadvantages associated with disrupting the desired function of the protein of interest due to the size and/or conformation of the fusion protein. Such disadvantages can be particularly evident when the protein of interest is a transmembrane protein. Thus, there is a need for improving the degron/aggregation domain technology. Furthermore, a need exists for methods of modifying T cells to treat various diseases and conditions such as but not limited to cancer, autoimmunity and alloimmunity without permanently modifying or suppressing the immune system.

### SUMMARY OF THE INVENTION

[0006] In one aspect, the invention features fusion proteins including two protein domains separated by a heterologous protease cleavage site (e.g., a protease cleave site that is cleaved by a mammalian intracellular or extracellular protease), wherein a first of the protein domains is a conditional expression domain, e.g., a degradation domain or an aggregation domain, and the second protein is a protein of interest, e.g., a transmembrane protein (e.g., a CAR).

[0007] In some embodiments, the conditional expression domain is a degradation domain, e.g., a degradation domain as described herein. Without wishing to be bound by theory, in some embodiments, the degradation domain is unstable and/or unable to fold into a stable conformation in the absence of an expression compound, e.g., a stabilization compound. The misfolded/unfolded degradation domain can be degraded by intracellular degradation pathways along with the other domain(s) of the fusion protein (see, for example, FIG. 25). In the presence of the expression compound, the degradation domain is able to fold into a stable conformation and is less susceptible to intracellular degradation pathways, e.g., relative to the degradation domain in the absence of the expression compound. Thus, the level and/or rate of cell surface expression or extracellular expression of the fusion protein is enhanced, e.g., by at least 2-, 3-, 4-, 5-, 6-, 7-, 8-, 9-, 10-, 20-, or 30-fold, in the presence of the expression compound relative to the absence of the expression compound. In some embodiments, once the degradation domain of the fusion protein assumes a proper conformation, the heterologous cleavage site is exposed, leading to removal of the degradation domain, and thus, freeing the second protein domain.

[0008] In other embodiments, the conditional expression domain is an aggregation domain. Without wishing to be bound by theory, in some embodiments in the absence of expression compound, e.g., deaggregation compound, the aggregation domain of the fusion protein associates with one or more other aggregation domains into oligomers and aggregates (see, for example, FIG. 26). The aggregated fusion protein can be sequestered in the cellular compartment in which it is aggregated. In the presence of expression compound, e.g., deaggregation compound, the aggregation domains dissociate from one another, and the fusion proteins are solubilized (e.g., assumes a monomeric configuration). Thus, the level and/or rate of cell surface expression or extracellular expression of the fusion protein is enhanced, e.g., by at least 2-, 3-, 4-, 5-, 6-, 7-, 8-, 9-, 10-, 20-, or 30-fold, in the presence of the expression compound relative to the absence of the expression compound. In some embodiments, once the aggregation domain of the fusion protein is solubilized, the heterologous cleavage site is exposed, leading to removal of the aggregation domain, and thus, freeing the second protein domain.

[0009] In any of the foregoing aspects and embodiments, the fusion protein includes a first protein domain that is or comprises a conditional expression domain, e.g., a degradation domain or an aggregation domain, and a second protein domain that is or comprises a protein of interest, e.g., a transmembrane protein (e.g., a CAR), wherein the first and the second domains of the fusion protein are separated by a heterologous protease cleavage site (e.g., a protease cleave site that is cleaved by a mammalian intracellular or extracellular protease). In some embodiments, the conditional expression domain, e.g., the degradation or the aggregation domain, is located N-terminal to the second protein domain. In certain embodiments, the fusion protein further includes a signal peptide N-terminal to the degradation domain.

[0010] In one aspect, the invention pertains to a fusion protein, comprising two protein domains separated by a heterologous protease cleavage site, wherein a first of said protein domains is a conditional expression domain, and a second of said protein domains is a transmembrane protein, wherein the conditional expression domain has a first state associated with a first level of surface expression and/or extracellular expression of the fusion protein and a second state associated with a second level of surface expression and/or extracellular expression of the fusion protein, wherein the second level is increased, e.g., by at least 2, 3, 4, 5, 10, 20 or 30 fold over the first level in the presence of an expression compound.

[0011] In another aspect, the invention pertains to a fusion protein, comprising two protein domains separated by a heterologous protease cleavage site, wherein a first of said protein domains is a conditional expression domain, and a second of said protein domains is a transmembrane protein, wherein the heterologous protease cleavage site is a furin cleavage site, provided that the furin cleavage site does not comprise the amino acid sequence SARNRQKR (SEQ ID NO: 981).

[0012] In another aspect, the invention pertains to a fusion protein, comprising two protein domains separated by a heterologous protease cleavage site, wherein a first of said protein domains is a conditional expression domain, and a second of said protein domains is a chimeric antigen receptor (CAR).

[0013] In some embodiments, the conditional expression domain is a degradation domain.

[0014] In some embodiments, the conditional expression domain is an aggregation domain.

[0015] In some embodiments, the fusion protein comprises two protein domains separated by a heterologous protease cleavage site, wherein the first of said protein domains (also referred to herein as the first protein domain) is or comprises a degradation domain, e.g., a degradation domain as described herein, and the second of said protein domains (also referred to herein as the second protein domain) is a protein of interest. In one embodiment, the protein of interest is a transmembrane protein, e.g., a CAR.

[0016] In some embodiments, the degradation domain is chosen from an estrogen receptor (ER) domain, an FKB protein (FKBP) domain or an dihydrofolate reductase (DHFR).

[0017] In some embodiments, the degradation domain has a first state associated with a first level of surface expression and/or extracellular expression of the fusion protein and a second state associated with a second level of surface expression and/or extracellular expression of the fusion protein, wherein the second level is increased, e.g., by at least 2, 3, 4, 5, 10, 20 or 30 fold over the first level in the presence of a stabilization compound.

[0018] In certain embodiments, the degradation domain is derived from an estrogen receptor. For example, the degradation domain can comprise an amino acid sequence selected from SEQ ID NO: 58 or a sequence having at least 90%, 95%, 97%, 98%, or 99% identity thereto, or SEQ ID NO: 121 or a sequence having at least 90%, 95%, 97%, 98%, or 99% identity thereto. In some embodiments, the degradation domain comprises an amino acid sequence selected from SEQ ID NO: 58 or SEQ ID NO: 121. When the degradation domain is derived from an estrogen receptor, the stabilization compound can be selected from Bazedoxifene or 4-hydroxy tamoxifen (4-OHT). In some embodiments, the stabilization compound is Bazedoxifene. Tamoxifen and Bazedoxifene are FDA approved drugs, and thus are safe to use in a human.

[0019] In certain embodiments, the degradation domain is derived from an FKB protein (FKBP). For example, the degradation domain can comprise an amino acid sequence of SEQ ID NO: 56 or a sequence having at least 90%, 95%, 97%, 98%, or 99% identity thereto. In some embodiments, the degradation domain comprises SEQ ID NO: 56. When the degradation domain is derived from a FKBP, the stabilization compound can be Shield-1.

[0020] In some embodiments, the degradation domain is derived from dihydrofolate reductase (DHFR). In some embodiments, the degradation domain comprises an amino acid sequence selected from SEQ ID NO: 57 or a sequence having at least 90%, 95%, 97%, 98%, or 99% identity thereto. In some embodiments, the degradation domain comprises SEQ ID NO: 57. When the degradation domain is derived from a DHFR, the stabilization compound can be Trimethoprim.

[0021] In other embodiments, the degradation domain is not derived from an FKB protein or estrogen receptor.

[0022] In some embodiments, the fusion protein comprises two protein domains separated by a heterologous protease cleavage site, wherein the first of said protein domains (also referred to herein as the first protein domain) is or comprises a aggregation domain, e.g., an aggregation domain as described herein, and the second of said protein domains (also referred to herein as the second protein domain) is a protein of interest. In one embodiment, the protein of interest is a transmembrane protein, e.g., a CAR.

[0023] In some embodiments, the fusion protein comprises two protein domains separated by a heterologous protease cleavage site, wherein a first of said protein domains is an aggregation domain, and a second of said protein domains is a transmembrane protein, wherein the aggregation domain has a first state associated with a first level of surface expression and/or extracellular expression of the fusion protein and a second state associated with a second level of surface expression and/or extracellular expression of the fusion protein, and wherein the second level is increased, e.g., by at least 2, 3, 4, 5, 10, 20 or 30 fold over the first level in the presence of a deaggregation compound.

[0024] In some embodiments, the fusion protein, comprises two protein domains separated by a heterologous protease cleavage site, wherein a first of said protein domains is an aggregation domain, and a second of said protein domains is a transmembrane protein, wherein the heterologous protease cleavage site is a furin cleavage site, provided that the furin cleavage site does not comprise the amino acid sequence SARNRQKR (SEQ ID NO: 981).

[0025] In some embodiments, the fusion protein, comprises two protein domains separated by a heterologous protease cleavage site, wherein a first of said protein domains is an aggregation domain, and a second of said protein domains is a chimeric antigen receptor (CAR).

[0026] In some embodiments, the aggregation domain comprises 1, 2, 3, 4 5, 6, 7, 8, or more repeats of a dimerization domain, e.g., a homodimerization or a heterodimerization domain.

[0027] In some embodiments, the aggregation domain is from an FKB protein (FKBP).

[0028] In some embodiments, the aggregation domain is an FKBP F36M domain.

[0029] In some embodiments, the aggregation domain is from an FKB protein (FKBP) and comprises an amino acid sequence that is at least 90, 95, 97, 98, 99, or 100% identical to either of SEQ ID NOs: 975 or 976.

[0030] In some embodiments, the fusion protein comprises a further 2nd, 3^{rd}, 4^{th}, 5^{th}, 6^{th}, 7^{th}, 8^{th}, 9^{th}, or 10^{th} aggregation domain.

[0031] In some embodiments, the 2nd, 3^{rd}, 4^{th}, 5^{th}, 6^{th}, 7^{th}, 8^{th}, 9^{th} or 10^{th} aggregation domain is the same type of aggregation domain as the first aggregation domain.

[0032] In some embodiments, the aggregation domain forms homodimers with the same aggregation domain.

[0033] In some embodiments, the fusion protein comprises a plurality of aggregation domains, wherein the plurality comprises more than one, e.g., two, types of aggregation domains, and a first type of aggregation domain forms heterodimers with a second type of aggregation domain.

[0034] In some embodiments, the fusion protein comprises 2, 4, 6, 8, or 10 aggregation domains, wherein the fusion protein comprises equal numbers of the first type of aggregation domain and the second type of aggregation domain.

[0035] In some embodiments, the aggregation domains are disposed in the fusion protein in an alternating order of first type and second type, e.g., first, second, first, second, or second, first, second, first.

[0036] In some embodiments, said deaggregation compound is selected from FK506, rapamycin, AP22542, AP21998, and Shield-1 when the fusion protein comprises an aggregation domain derived from FKB protein (FKBP), e.g., FKBP F36M.

[0037] In some embodiments, said heterologous cleavage site is cleaved by a mammalian intracellular protease.

[0038] In some embodiments, said cleavage site is cleaved by a protease selected from the group consisting of furin, PCSK1, PCSK5, PCSK6, PCSK7, cathepsin B, Granzyme B, Factor XA, Enterokinase, genenase, sortase, precission protease, thrombin, TEV protease, and elastase 1.

[0039] In some embodiments, said cleavage site comprises a polypeptide having an cleavage motif selected from the group consisting of RX(K/R)R consensus motif, RXXX[KR]R consensus motif, RRX consensus motif, I-E-P-D-X consensus motif (SEQ ID NO: 35), Glu/Asp-Gly-Arg, Asp-Asp-Asp-Asp-Lys (SEQ ID NO: 36), Pro-Gly-Ala-Ala-His-Tyr (SEQ ID NO: 37), LPXTG/A consensus motif, Leu-Glu-Val-Phe-Gln-Gly-Pro (SEQ ID NO: 38), Leu-Val-Pro-Arg-Gly-Ser (SEQ ID NO: 40), E-N-L-Y-F-Q-G (SEQ ID NO: 41), and [AGSV]-x (SEQ ID NO: 42).

[0040] In some embodiments, said cleavage site is cleaved by furin.

[0041] In some embodiments, the fusion protein comprises a furin cleavage site selected from RTKR (SEQ ID NO: 123); GTGAEDPRPSRKRRSLGDVG (SEQ ID NO: 125); GTGAEDPRPSRKRR (SEQ ID NO: 127); LQWLEQQVAKRRTKR (SEQ ID NO: 129); GTGAEDPRPSRKRRSLGG (SEQ ID NO: 131); GTGAEDPRPSRKRRSLG (SEQ ID NO: 133); SLNLTESHNSRKKR (SEQ ID NO: 135); or CKINGYPKRGRKRR (SEQ ID NO: 137).

[0042] In some embodiments, the fusion protein comprises a furin cleavage site selected from

(SEQ ID NO: 125)
GTGAEDPRPSRKRRSLGDVG;
or
(SEQ ID NO: 127)
GTGAEDPRPSRKRR.

[0043] In some embodiments, the fusion protein comprises the furin cleavage site of

(SEQ ID NO: 125)
GTGAEDPRPSRKRRSLGDVG.

[0044] In some embodiments, said heterologous protease cleavage site is cleaved by a mammalian extracellular protease.

[0045] In some embodiments, said mammalian extracellular protease is selected from the group consisting of Factor XA, Enterokinase, genenase, sortase, precission protease, thrombin, TEV protease, and elastase 1.

[0046] In some embodiments, said cleavage site comprises a polypeptide having an amino acid sequence selected from the group consisting of Glu/Asp-Gly-Arg, Asp-Asp-Asp-Asp-Lys (SEQ ID NO: 36), Pro-Gly-Ala-Ala-His-Tyr (SEQ ID NO: 37), LPXTG/A consensus motif, Leu-Glu-Val-Phe-Gln-Gly-Pro (SEQ ID NO: 38), Leu-Val-Pro-Arg-Gly-Ser (SEQ ID NO: 40), E-N-L-Y-F-Q-G (SEQ ID NO: 41), and [AGSV]-x (SEQ ID NO: 42).

[0047] In any of the foregoing aspects and embodiments, the heterologous cleavage site is cleaved by furin, PCSK1, PCSK5, PCSK6, PCSK7, cathepsin B, Granzyme B, Factor XA, Enterokinase, genenase, sortase, precission protease, thrombin, TEV protease, or elastase 1. For example, the protease cleave site can include a polypeptide having an cleavage motif selected from RX(K/R)R consensus motif, RXXX[KR]R consensus motif, RRX consensus motif, I-E-P-D-X consensus motif (SEQ ID NO: 35), Glu/Asp-Gly-Arg, Asp-Asp-Asp-Asp-Lys (SEQ ID NO: 36), Pro-Gly-Ala-Ala-His-Tyr (SEQ ID NO: 37), LPXTG/A consensus motif, Leu-Glu-Val-Phe-Gln-Gly-Pro (SEQ ID NO: 38), Leu-Val-Pro-Arg-Gly-Ser (SEQ ID NO: 40), E-N-L-Y-F-Q-G (SEQ ID NO: 41), or [AGSV]-x (SEQ ID NO: 42). In certain embodiments, the mammalian extracellular protease is selected from Factor XA, Enterokinase, genenase, sortase, precission protease, thrombin, TEV protease, or elastase 1 (e.g., the cleavage site can include a polypeptide having an amino acid sequence selected from Glu/Asp-Gly-Arg, Asp-Asp-Asp-Asp-Lys (SEQ ID NO: 36), Pro-Gly-Ala-Ala-His-Tyr (SEQ ID NO: 37), LPXTG/A consensus motif, Leu-Glu-Val-Phe-Gln-Gly-Pro (SEQ ID NO: 38), Leu-Val-Pro-Arg-Gly-Ser (SEQ ID NO: 40), E-N-L-Y-F-Q-G (SEQ ID NO: 41), or [AGSV]-x (SEQ ID NO: 42)).

[0048] In some embodiments, the fusion protein described herein includes a furin cleavage site. In some embodiments, the fusion proteins described herein include any one of furin cleavage sites listed in Table 20. In some embodiments, the fusion proteins described herein include a furin cleavage site selected from RTKR (SEQ ID NO: 123) or a sequence having at least 90%, 95%, 97%, 98%, or 99% identity thereto; GTGAEDPRPSRKRRSLGDVG (SEQ ID NO: 125) or a sequence having at least 90%, 95%, 97%, 98%, or 99% identity thereto; GTGAEDPRPSRKRR (SEQ ID NO: 127) or a sequence having at least 90%, 95%, 97%, 98%, or 99% identity thereto; LQWLEQQVAKRRTKR (SEQ ID NO: 129) or a sequence having at least 90%, 95%, 97%, 98%, or 99% identity thereto; GTGAEDPRPSRKRRSLGG (SEQ ID NO: 131) or a sequence having at least 90%, 95%, 97%, 98%, or 99% identity thereto; GTGAEDPRPSRKRRSLG (SEQ ID NO: 133) or a sequence having at least 90%, 95%, 97%, 98%, or 99% identity thereto; SLNLTESHNSRKKR (SEQ ID NO: 135) or a sequence having at least 90%, 95%, 97%, 98%, or 99% identity thereto; or CKINGYPKRGRKRR (SEQ ID NO: 137) or a sequence having at least 90%, 95%, 97%, 98%, or 99% identity thereto. In some embodiments, the fusion proteins described herein include a furin cleavage site selected from GTGAEDPRPSRKRRSLGDVG (SEQ ID NO: 125) or a sequence having at least 90%, 95%, 97%, 98%, or 99% identity thereto, or GTGAEDPRPSRKRR (SEQ ID NO: 127) or a sequence having at least 90%, 95%, 97%, 98%, or 99% identity thereto. In some embodiments, the fusion proteins described herein include the furin cleavage site of GTGAEDPRPSRKRRSLGDVG (SEQ ID NO: 125) or a sequence having at least 90%, 95%, 97%, 98%, or 99% identity thereto.

[0049] In some embodiments, the fusion proteins described herein include a furin cleavage site selected from RTKR (SEQ ID NO: 123); GTGAEDPRPSRKRRSLGDVG (SEQ ID NO: 125); GTGAEDPRPSRKRR (SEQ ID NO: 127); LQWLEQQVAKRRTKR (SEQ ID NO: 129); GTGAEDPRPSRKRRSLGG (SEQ ID NO: 131); GTGAEDPRPSRKRRSLG (SEQ ID NO: 133); SLNLTESHNSRKKR (SEQ ID NO: 135); or CKINGYPKRGRKRR (SEQ ID NO: 137). In some embodiments, the fusion proteins described herein include a furin cleavage site selected from GTGAEDPRPSRKRRSLGDVG (SEQ ID NO: 125) or GTGAEDPRPSRKRR (SEQ ID NO: 127). In some embodiments, the fusion proteins described herein include the furin cleavage site of GTGAEDPRPSRKRRSLGDVG (SEQ ID NO: 125).

[0050] In some embodiments, the conditional expression domain, e.g., aggregation domain or degradation domain, is located N-terminal to said second protein domain or C-terminal to said second protein domain.

[0051] In some embodiments, said fusion protein further comprises a signal peptide N-terminal to said conditional expression domain, e.g., aggregation domain or degradation domain. In some embodiments, the fusion protein further comprises a linker positioned between the signal peptide and said conditional expression domain, e.g., aggregation domain or degradation domain. In some embodiments, the linker is a linker in any fusion protein listed in Tables 23 and 24.

[0052] In some embodiments, the fusion protein comprises an amino acid sequence of any fusion protein listed in Tables 22, 23, or 24.

[0053] In any of the foregoing aspects and embodiments, a second of the protein domains is a transmembrane protein (e.g., a transmembrane receptor). In any of the foregoing aspects, the transmembrane receptor can be, e.g., a synthetic protein (e.g., a chimeric antigen receptor). Chimeric antigen receptors can include, e.g., in a N-terminal to C-terminal direction, an antigen binding domain, a transmembrane domain, and one or more intracellular signaling domains. The signaling domain may include one or more primary signaling domains (e.g., a CD3-zeta stimulatory domain) and, optionally, one or more costimulatory signaling domains (e.g., an intracellular domain from a costimulatory protein selected from CD27, CD28, 4-1BB (CD137), OX40, GITR, CD30, CD40, ICOS, BAFFR, HVEM, ICAM-1, lymphocyte function-associated antigen-1 (LFA-1), CD2, CDS, CD7, CD287, LIGHT, NKG2C, NKG2D, SLAMF7, NKp80, NKp30, NKp44, NKp46, CD160, B7-H3, or a ligand that specifically binds CD83).

[0054] In certain of the above embodiments, the antigen binding domain is an scFv. Also, the antigen binding domain may binds an antigen selected from CD19; CD123; CD22; CD30; CD171; CS-1; C-type lectin-like molecule-1, CD33; epidermal growth factor receptor variant III (EGFRvIII); ganglioside G2 (GD2); ganglioside GD3; TNF receptor family member B cell maturation (BCMA); Tn antigen ((Tn Ag) or (GalNAcα-Ser/Thr)); prostate-specific membrane antigen (PSMA); Receptor tyrosine kinase-like orphan receptor 1 (ROR1); Fms-Like Tyrosine Kinase 3 (FLT3); Tumor-associated glycoprotein 72 (TAG72); CD38; CD44v6; Carcinoembryonic antigen (CEA); Epithelial cell adhesion molecule (EPCAM); B7H3 (CD276); KIT (CD117); Interleukin-13 receptor subunit alpha-2; Mesothelin; Interleukin 11 receptor alpha (IL-11Ra); prostate stem cell antigen (PSCA); Protease Serine 21; vascular endothelial growth factor receptor 2 (VEGFR2); Lewis(Y) antigen; CD24; Platelet-derived growth factor receptor beta (PDGFR-beta); Stage-specific embryonic antigen-4 (SSEA-4); CD20; Folate receptor alpha; Receptor tyrosine-protein kinase ERBB2 (Her2/neu); Mucin 1, cell surface associated (MUC1); epidermal growth factor receptor (EGFR); neural cell adhesion molecule (NCAM); Prostase; prostatic acid phosphatase (PAP); elongation factor 2 mutated (ELF2M); Ephrin B2; fibroblast activation protein alpha (FAP); insulin-like growth factor 1 receptor (IGF-I receptor), carbonic anhydrase IX (CAIX); Proteasome (Prosome, Macropain) Subunit, Beta Type, 9 (LMP2); glycoprotein 100 (gp100); oncogene fusion protein including breakpoint cluster region (BCR) and Abelson murine leukemia viral oncogene homolog 1 (Abl) (bcr-abl); tyrosinase; ephrin type-A receptor 2 (EphA2); Fucosyl GM1; sialyl Lewis adhesion molecule (sLe); ganglioside GM3; transglutaminase 5 (TGS5); high molecular weight-melanoma-associated antigen (HMWMAA); o-acetyl-GD2 ganglioside (OAcGD2); Folate receptor beta; tumor endothelial marker 1 (TEM1/CD248); tumor endothelial marker 7-related (TEM7R); claudin 6 (CLDN6); thyroid stimulating hormone receptor (TSHR); G protein-coupled receptor class C group 5, member D (GPRC5D); chromosome X open reading frame 61 (CXORF61); CD97; CD179a; anaplastic lymphoma kinase (ALK); Polysialic acid; placenta-specific 1 (PLAC1); hexasaccharide portion of globoH glycoceramide (GloboH); mammary gland differentiation antigen (NY-BR-1); uroplakin 2 (UPK2); Hepatitis A virus cellular receptor 1 (HAVCR1); adrenoceptor beta 3 (ADRB3); pannexin 3 (PANX3); G protein-coupled receptor 20 (GPR20); lymphocyte antigen 6 complex, locus K 9 (LY6K); Olfactory receptor 51E2 (OR51E2); TCR Gamma Alternate Reading Frame Protein (TARP); Wilms tumor protein (WT1); Cancer/testis antigen 1 (NY-ESO-1); Cancer/testis antigen 2 (LAGE-1a); Melanoma-associated antigen 1 (MAGE-A1); ETS translocation-variant gene 6, located on chromosome 12p (ETV6-AML); sperm protein 17 (SPA17); X Antigen Family, Member 1A (XAGE1); angiopoietin-binding cell surface receptor 2 (Tie 2); melanoma cancer testis antigen-1 (MAD-CT-1); melanoma cancer testis antigen-2 (MAD-CT-2); Fos-related antigen 1; tumor protein p53 (p53); p53 mutant; prostein; surviving; telomerase; prostate carcinoma tumor antigen-1, melanoma antigen recognized by T cells 1; Rat sarcoma (Ras) mutant; human Telomerase reverse transcriptase (hTERT); sarcoma translocation breakpoints; melanoma inhibitor of apoptosis (ML-IAP); ERG (transmembrane protease, serine 2 (TMPRSS2) ETS fusion gene); N-Acetyl glucosaminyl-transferase V (NA17); paired box protein Pax-3 (PAX3); Androgen receptor; Cyclin B1; v-myc avian myelocytomatosis viral oncogene neuroblastoma derived homolog (MYCN); Ras Homolog Family Member C (RhoC); Tyrosinase-related protein 2 (TRP-2); Cytochrome P450 1B1 (CYP1B1); CCCTC-Binding Factor (Zinc Finger Protein)-Like, Squamous Cell Carcinoma Antigen Recognized By T Cells 3 (SART3); Paired box protein Pax-5 (PAX5); proacrosin binding protein sp32 (OY-TES1); lymphocyte-specific protein tyrosine kinase (LCK); A kinase anchor protein 4 (AKAP-4); synovial sarcoma, X breakpoint 2 (SSX2); Receptor for Advanced Glycation Endproducts (RAGE-1); renal ubiquitous 1 (RU1); renal ubiquitous 2 (RU2); legumain; human papilloma virus E6 (HPV E6); human papilloma virus E7 (HPV E7); intestinal carboxyl esterase; heat shock protein 70-2 mutated (mut hsp70-2); CD79a; CD79b; CD72; Leukocyte-associated immunoglobulin-like receptor 1 (LAIR1); Fc fragment of IgA receptor (FCAR or CD89); Leukocyte immunoglobulin-like receptor subfamily A member 2 (LILRA2); CD300 molecule-like family member f (CD300LF); C-type lectin domain family 12 member A (CLEC12A); bone marrow stromal cell antigen 2 (BST2); EGF-like module-containing mucin-like hormone receptor-like 2 (EMR2); lymphocyte antigen 75 (LY75); Glypican-3 (GPC3); Fc receptor-like 5 (FCRL5); or immunoglobulin lambda-like polypeptide 1 (IGLL1).

[0055] In some embodiments, the fusion protein comprises an antigen binding domain that binds CD19. In some embodiments, the fusion protein comprises an antigen binding domain comprising an amino acid sequence selected from any one of SEQ ID NOs: 356-368 or 381. In some embodiments, the fusion protein comprises a chimeric antigen receptor comprising an amino acid sequence selected from any one of SEQ ID NOs: 897, 902, 907, 912, 917, 922, 927, 932, 937, 942, 947, 952, 956.

[0056] In some embodiments, the fusion protein comprises an antigen binding domain that binds CD123. In some embodiments, the fusion protein comprises an antigen binding domain comprising an amino acid sequence selected from any one of SEQ ID NOs: 751, 756, 761, or 766. In some embodiments, the fusion protein comprises a chimeric antigen receptor comprising an amino acid sequence selected from any one of SEQ ID NOs: 750, 755, 760, or 765.

[0057] In some embodiments, the fusion protein comprises an antigen binding domain that binds BCMA. In some embodiments, the fusion protein comprises an antigen binding domain comprising an amino acid sequence selected from any one of SEQ ID NOs: 382, 386, 390, 394, 398, 402, 406, 410, 414, 418, 422, 426, 430, 434, 438, 442, 446, 450, 454, 458, 462, 466, 470, 474, 478, 482, 486, 490, 494, 498, 502, 506, 510, 514, 518, 522, 528, 531, 534, or 537. In some embodiments, the fusion protein comprises a chimeric antigen receptor comprising an amino acid sequence selected from any one of SEQ ID NOs: 789, 791, 793, 795, 797, 799, 801, 803, 805, 807, 809, 811, 813, 815, 817, 819, 821, 823, 825, 827, 829, 831, 833, 835, 837, 839, 841, 843, 845, 847, 849, 851, 853, 855, 857, or 859.

[0058] In some embodiments, the fusion protein comprises an antigen binding domain that binds CD20. In some embodiments, the fusion protein comprises an antigen binding domain comprising an amino acid sequence located at positions 470-712 or 470-939 of SEQ ID NO: 3033. In some embodiments, the fusion protein comprises a chimeric antigen receptor comprising an amino acid sequence of SEQ ID NO: 3033.

[0059] Cells, Nucleic Acids and Method of Making the Fusion Proteins

[0060] In another aspect, the invention features a cell, e.g., a host cell including any one of the foregoing fusion proteins. In some embodiments, the cell, e.g., the host cell, is an immune cell, e.g., an immune effector cell. In some embodiments, the cell is a T cell or an NK cell.

[0061] In yet another aspect, the invention features a nucleic acid (e.g., an mRNA or DNA molecule) encoding any one of the foregoing fusion proteins. In another aspect, the invention features a vector (e.g., a viral vector (such as a lentiviral vector)) containing such a nucleic acid. The invention also features a viral particle including such a viral vector.

[0062] In yet another aspect, the invention features a cell, e.g., host cell (e.g., a human T cell) containing any of the foregoing vectors, nucleic acids, or fusion proteins.

[0063] In certain embodiments, the cell further includes a protease capable of cleaving the heterologous protease cleavage site. In certain embodiments, the host cell can further include a stabilization compound (e.g., Bazedoxifene, Shield1 or 1 μM 4-OHT (4-hydroxy tamoxifen)) wherein said degradation domain assumes a conformation permissive to cellular degradation in the absence of said stabilization compound.

[0064] In some embodiments, in the absence of an expression compound, e.g., a stabilization compound, the fusion protein is degraded by cellular degradation pathways, e.g., at least 50%, 60%, 70%, 80%, 90% or greater of the fusion protein is degraded.

[0065] In some embodiments, in the absence of an expression compound, e.g., deaggregation compound, the fusion protein is in an aggregated state in the cell, e.g., in the endoplasmic reticulum or the cytosol, e.g., at least 50%, 60%, 70%, 80%, 90% or greater is in the aggregated state.

[0066] In some embodiments, said cell further comprises an expression compound, e.g., a stabilization compound.

[0067] In some embodiments, the conditional expression domain, e.g., degradation domain, assumes a conformation more resistant to cellular degradation in the presence of the expression compound, e.g., stabilization compound, relative to a conformation in the absence of the expression compound.

[0068] In some embodiments, the conformation of the fusion protein is more permissive to cleavage at the heterologous protease cleavage site in the presence of the expression compound, e.g., stabilization compound, relative to a conformation in the absence of the expression compound.

[0069] In some embodiments, the level of cell surface expression or extracellular expression of the fusion protein is greater, e.g., 2, 3, 4, 5, 6, 7, 8, 9, 10, 20, or 30 fold greater, than the level of cell surface expression or extracellular expression of the fusion protein in a cell not comprising an expression compound, e.g., a stabilization compound.

[0070] In some embodiments, said cell further comprises an expression compound, e.g., a deaggregation compound.

[0071] In some embodiments, the conditional expression domain, e.g., aggregation domain, assumes a conformation more resistant to oligomerization or aggregation in the presence of the expression compound, e.g., deaggregation compound, relative to a conformation in the absence of the expression compound.

[0072] In some embodiments, the conformation of the fusion protein is more permissive to cleavage at the heterologous protease cleavage site in the presence of the expression compound, e.g., deaggregation compound, relative to a conformation in the absence of the expression compound.

[0073] In some embodiments, the level of cell surface expression or extracellular expression of the fusion protein is greater, e.g., 2, 3, 4, 5, 6, 7, 8, 9, 10, 20, or 30 fold greater, than the level of cell surface expression or extracellular expression of the fusion protein in a cell not comprising an expression compound, e.g., a deaggregation compound.

[0074] In yet another aspect, a method of making a fusion protein as described herein is disclosed. The method includes providing a cell, e.g., a host cell as described herein, e.g., a host cell comprising any of the foregoing vectors, nucleic acids, or fusion proteins, under conditions suitable for expression.

[0075] In another aspect, the invention also features a method of conditionally expressing a protein of interest. In one embodiment, the protein of interest is a transmembrane protein, e.g., a CAR.

[0076] In some embodiments, the invention also features a method for conditionally expressing a protein of interest, transmembrane protein, or CAR on the surface of a cell (e.g., an immune cell, e.g., a host cell). The method includes:
[0077] providing a cell, e.g., an immune cell (e.g., a host cell) comprising a fusion protein or a nucleic acid encoding the fusion protein (e.g., any of the fusion proteins described herein);
[0078] contacting the fusion protein or the cell comprising said fusion protein with an expression compound, wherein:
[0079] (a) in the presence of said expression compound, the surface expression of said protein of interest, transmembrane protein, or CAR is increased, e.g., 2, 3, 4, 5, 6, 7, 8, 9, 10, 20, or 30 fold greater, relative a reference value, e.g., relative to the level of surface expression of said protein of interest, transmembrane protein, or CAR in the absence of said expression compound; and
[0080] (b) in the absence of said expression compound, the surface expression of said protein of interest, transmembrane protein, or CAR is substantially decreased, e.g., e.g., 2, 3, 4, 5, 6, 7, 8, 9, 10, 20, or 30 fold less, relative a reference value, e.g., relative relative to the level of surface expression of said protein of interest, transmembrane protein, or CAR in the presence of the expression compound.

[0081] In some embodiments, the presence of said expression compound is associated with, e.g., causes, a change in conformation of the conditional expression domain from a first folding state to second folding state, wherein the first folding state is more susceptible to degradation, e.g., cellular degradation, or aggregation relative to the second folding state.

[0082] In some embodiments, the presence of said expression compound exposes the heterologous protease cleavage site, e.g., to a greater extent, e.g., 2, 3, 4, 5, 6, 7, 8, 9, 10, 20, or 30 fold greater, relative the exposure of the protease cleavage site in the absence of said expression compound.

[0083] In some embodiments, the invention also features a method of conditionally expressing a protein of interest, transmembrane protein, or CAR, said method comprising contacting a cell, e.g., a host cell and/or a cell described herein, with a stabilization compound, wherein:

[0084] (a) in the presence of said stabilization compound,

[0085] (i) said degradation domain assumes a conformation more resistant to cellular degradation relative to a conformation in the absence of the stabilization compound,

[0086] thereby resulting in cleavage of said degradation domain from said protein of interest, transmembrane protein, or CAR and the expression of said protein of interest, transmembrane protein, or CAR; and

[0087] (b) in the absence of said stabilization compound, said degradation domain assumes a conformation more permissive to cellular degradation relative to a conformation in the presence of stabilization compound, thereby resulting in degradation of said protein of interest, transmembrane protein, or CAR.

[0088] In some embodiments, said cell is contacted with said stabilization compound ex vivo.

[0089] In some embodiments, said cell is contacted with said stabilization compound in vivo.

[0090] In some embodiments, the invention also features a method of conditionally expressing a protein of interest, transmembrane protein, or CAR, said method comprising contacting a cell, e.g., a host cell and/or a cell described herein, with a deaggregation compound, wherein:

[0091] (a) in the presence of said deaggregation compound,

[0092] (i) said aggregation domain assumes a conformation more resistant to aggregation or oligomerization relative to a conformation in the absence of the deaggregation compound,

[0093] thereby resulting in cleavage of said aggregation domain from said protein of interest, transmembrane protein, or CAR and the expression of said protein of interest, transmembrane protein, or CAR; and

[0094] (b) in the absence of said deaggregation compound, said aggregation domain assumes a conformation more permissive to aggregation or oligomerization relative to a conformation in the presence of the deaggregation compound, thereby resulting in aggregation of said protein of interest, transmembrane protein, or CAR.

[0095] In some embodiments, said cell is contacted with said deaggregation compound ex vivo.

[0096] In some embodiments, said cell is contacted with said deaggregation compound in vivo.

[0097] In yet another aspect, the invention features a method of treating a subject having a disease associated with expression of a tumor antigen, including administering to the subject an effective amount of any of the foregoing host cells, wherein the second protein is a chimeric antigen receptor and includes, in a N-terminal to C-terminal direction, an antigen binding domain, a transmembrane domain, and one or more intracellular signaling domains and the antigen binding domain specifically binds the tumor antigen. In yet another aspect, the invention features a method of treating an autoantibody or alloantibody disease or condition, the method comprising administering to the subject an effective amount of the foregoing host cell, wherein said second protein is a chimeric antigen receptor and comprises, in a N-terminal to C-terminal direction, an antigen binding domain, a transmembrane domain, and one or more intracellular signaling domains and said antigen binding domain specifically binds an antigen specific of said autoantibody or alloantibody disease. In such methods, the host cell can be either autologous or non-autologous, e.g., allogeneic, to the subject. Such methods can further include the step of contacting the host cell, in vivo or ex vivo, with the foregoing stabilization compounds.

[0098] In some embodiments, the cell is contacted with an expression compound, and:

[0099] (a) in the presence of said expression compound,

[0100] (i) said conditional expression domain assumes a conformation more resistant to cellular degradation or aggregation relative to a conformation in the absence of said expression compound, thereby resulting in cleavage of said conditional expression domain from said chimeric antigen receptor (CAR) and the expression of said CAR; and

[0101] (b) in the absence of said expression compound, said conditional expression domain assumes a conformation more permissive to cellular degradation or aggregation relative to a conformation in the presence of said expression compound, thereby resulting in degradation or aggregation of said fusion protein.

[0102] In some embodiments, the cell, e.g., host cell, is contacted with a stabilization compound, and:

[0103] (a) in the presence of said stabilization compound,

[0104] (i) said degradation domain assumes a conformation more resistant to cellular degradation relative to a conformation in the absence of said stabilization compound,

[0105] thereby resulting in cleavage of said degradation domain from said chimeric antigen receptor (CAR) and the expression of said CAR; and

[0106] (b) in the absence of said stabilization compound, said degradation domain assumes a conformation more permissive to cellular degradation relative to a conformation in the presence of said stabilization compound, thereby resulting in degradation of said fusion protein.

[0107] In some embodiments, said stabilization compound is selected from Bazedoxifene or 4-hydroxy tamoxifen (4-OHT) when the fusion protein comprises a degradation domain derived from estrogen receptor.

[0108] In some embodiments, said stabilization compound is Shield-1 when the fusion protein comprises a degradation domain derived from an FKB protein.

[0109] In some embodiments, the cell is contacted with a deaggregation compound, and:

[0110] (a) in the presence of said deaggregation compound,

[0111] (i) said aggregation domain assumes a conformation more resistant to aggregation or oligomerization relative to a conformation in the absence of said deaggregation compound,

[0112] thereby resulting in cleavage of said aggregation domain from said chimeric antigen receptor (CAR) and the expression of said CAR; and

[0113] (b) in the absence of said deaggregation compound, said aggregation domain assumes a conformation more permissive to aggregation or oligomerization relative to a conformation in the presence of said deaggregation compound, thereby resulting in aggregation of said fusion protein.

[0114] In some embodiments, said deaggregation compound is selected from FK506, rapamycin, AP22542, and AP21998 when the fusion protein comprises an aggregation domain derived from FKB protein (FKBP), e.g., FKBP F36M.

[0115] In some embodiments, the autoantibody disease or condition is selected from the group consisting of bullous pemphigoid, epidermolysis bullosa acquisita, p200 pemphigoid, linear IgA bullous dermatosis, other pemphigoid group diseases, dermatitis herpetiformis, celiac disease, myasthenia gravis, Goodpasture's syndrome, granulomatosis with polyangiitis and other ANCA+ vasculitidies, autoimmune limbic encephalitis, anti-N-methyl-D-aspartate receptor encephalitis, neuromyelitis optica, autoimmune hemolytic anemia, autoantibody-associated end-organ damage in lupus and other connective tissue diseases (due to anti-dsDNA, anti-Ro, and other autoantibodies), Graves' and Hashimoto's thyroiditis, anti-insulin antibodies in diabetes, anti-insulin receptor antibodies in autoimmune hypoglycemia, cryoglobulinemia, rheumatoid arthritis, multiple sclerosis, Sjogren's syndrome, dermatomyositis, anti-Fc-epsilon receptor antibodies in chronic idiopathic urticaria, anti-folate receptor antibodies, anti-endothelial receptor or anti-adrenergic receptor antibodies in pulmonary arterial hypertension, refractory hypertension, dilated cadiomyopathy, an autoinflammatory syndrome, neuromyelitis optica, Goodpasture's syndrome, anti-NMDAR encephalitis, AIHA, ITP, TTP, Graves'/Hashimoto's disease, Primary biliary cirrhosis, Neonatal lupus, Maternal autoabs causing T cell destruction, Pulmonary alveolar proteinosis, Anti-folate receptor, Chronic inflammatory demyelinating polyneuropathy, and Idiopathic membranous nephropathy. In some embodiments, the alloantibody disease or condition is an immune reaction in response to an organ transplant, blood transfusion, pregnancy, or protein replacement therapy.

[0116] In some embodiments, the cancer is mesothelioma (e.g., malignant pleural mesothelioma), e.g., in a subject who has progressed on at least one prior standard therapy; lung cancer (e.g., non-small cell lung cancer, small cell lung cancer, squamous cell lung cancer, or large cell lung cancer); pancreatic cancer (e.g., pancreatic ductal adenocarcinoma, or metastatic pancreatic ductal adenocarcinoma (PDA), e.g., in a subject who has progressed on at least one prior standard therapy); esophageal adenocarcinoma, ovarian cancer (e.g., serous epithelial ovarian cancer, e.g., in a subject who has progressed after at least one prior regimen of standard therapy), breast cancer, colorectal cancer, bladder cancer or any combination thereof.

[0117] In some embodiments, the disease associated with expression of a tumor antigen is a cancer.

[0118] In some embodiments, the disease associated with expression of the tumor antigen is a hematological cancer, e.g., a hematological cancer chosen from a leukemia or lymphoma.

[0119] In some embodiments, the cancer is chosen from: chronic lymphocytic leukemia (CLL), mantle cell lymphoma (MCL), multiple myeloma, acute lymphoid leukemia (ALL), Hodgkin lymphoma, B-cell acute lymphoid leukemia (BALL), T-cell acute lymphoid leukemia (TALL), small lymphocytic leukemia (SLL), B cell prolymphocytic leukemia, blastic plasmacytoid dendritic cell neoplasm, Burkitt's lymphoma, diffuse large B cell lymphoma (DLBCL), DLBCL associated with chronic inflammation, chronic myeloid leukemia, myeloproliferative neoplasms, follicular lymphoma, pediatric follicular lymphoma, hairy cell leukemia, small cell- or a large cell-follicular lymphoma, malignant lymphoproliferative conditions, MALT lymphoma (extranodal marginal zone lymphoma of mucosa-associated lymphoid tissue), Marginal zone lymphoma, myelodysplasia and myelodysplastic syndrome, non-Hodgkin lymphoma, plasmablastic lymphoma, plasmacytoid dendritic cell neoplasm, Waldenstrom macroglobulinemia, splenic marginal zone lymphoma, splenic lymphoma/leukemia, splenic diffuse red pulp small B-cell lymphoma, hairy cell leukemia-variant, lymphoplasmacytic lymphoma, a heavy chain disease, plasma cell myeloma, solitary plasmocytoma of bone, extraosseous plasmocytoma, nodal marginal zone lymphoma, pediatric nodal marginal zone lymphoma, primary cutaneous follicle center lymphoma, lymphomatoid granulomatosis, primary mediastinal (thymic) large B-cell lymphoma, intravascular large B-cell lymphoma, ALK+ large B-cell lymphoma, large B-cell lymphoma arising in HHV8-associated multicentric Castleman disease, primary effusion lymphoma, B-cell lymphoma, acute myeloid leukemia (AML), or unclassifiable lymphoma.

[0120] In some embodiments, the cancer is chosen from MCL, CLL, ALL, Hodgkin lymphoma, AML, or multiple myeloma.

[0121] In yet another aspect, the invention features a fusion protein, cell, nucleic acid, viral particle, or vector described herein for use as a medicament.

[0122] In yet another aspect, the invention features a fusion protein, cell, nucleic acid, vector, or method described herein for use in the treatment of a disease expressing a tumor antigen.

[0123] Methods and Compositions for Use in Treating Autoantibody or Alloantibody Disease

[0124] In one aspect, the invention features methods of treating an autoantibody or alloantibody disease or condition in a subject in need thereof comprising administering an effective amount of a pharmaceutical composition comprising a modified T cell to the subject, wherein the modified T cell comprises a nucleic acid comprising a suicide gene and a nucleic acid encoding a chimeric antigen receptor (CAR) comprising an anti-B cell binding domain, a transmembrane domain, a costimulatory domain and an intracellular signaling domain. In another aspect, the invention features methods of treating an autoantibody or alloantibody disease or condition in a subject in need thereof comprising administering an effective amount of a pharmaceutical composition comprising a modified T cell to the subject, wherein the modified T cell comprises a nucleic acid encoding a dimerization domain and a chimeric antigen receptor (CAR) comprising an anti-B cell binding domain, a transmembrane domain, a costimulatory domain and an intracellular signaling domain.

[0125] In some embodiments, the suicide gene encodes the amino acid sequence selected from the group consisting of SEQ ID NOs: 3005-3007.

[0126] In some embodiments, the suicide gene further comprises a dimerization domain comprising the amino acid sequence selected from the group consisting of SEQ ID NO: 3013 and 3014.

[0127] In some embodiments, the dimerization domain comprises the amino acid sequence of SEQ ID NO: 980.

[0128] In some embodiments, the dimerization domain further comprises a furin cleavage site comprising the amino acid sequence of SEQ ID NO: 980.

[0129] In some embodiments, the CAR further comprises a signal peptide.

[0130] In some embodiments, the signal peptide comprises the amino acid sequence of SEQ ID NO: 3035.

[0131] In some embodiments, administering the effective amount comprises activating the modified T cell to effect cytotoxic function against B cells.

[0132] In some embodiments, the method further comprises activating a suicide gene product of the suicide gene to induce cell death of the modified T cell.

[0133] In some embodiments, activating the suicide gene product further comprises administering a dimerization agent to promote dimerization of the suicide gene product.

[0134] In some embodiments, activating the suicide gene product occurs after the modified T cell exerts cytotoxic function against B cells.

[0135] In some embodiments, activating the suicide gene product occurs after an onset of an adverse reaction in the subject to the modified T cell.

[0136] In some embodiments, the method further comprises repressing activation of a suicide gene product of the suicide gene to repress cell death of the modified T cell.

[0137] In some embodiments, repressing activation of the suicide gene product further comprises administering a solubilizing agent to prevent dimerization of the suicide gene product.

[0138] In some embodiments, administering the solubilizing agent occurs concurrently with administration of the modified T cell and continues as the modified T cell exerts cytotoxic function against B cells.

[0139] In some embodiments, administering the solubilizing agent is ceased after an onset of an adverse reaction in the subject to the modified T cell.

[0140] In some embodiments, the anti-B cell binding domain of the CAR comprises an antibody selected from the group consisting of a monoclonal antibody, a polyclonal antibody, a synthetic antibody, human antibody, humanized antibody, single domain antibody, single chain variable fragment, and antigen-binding fragments thereof.

[0141] In some embodiments, the anti-B cell binding domain of the CAR specifically binds a B cell marker selected from the group consisting of CD19, BCMA, CD20, CD21, CD27, CD38, CD138 and any combination thereof.

[0142] In some embodiments, the anti-B cell binding domain of the CAR specifically binds a B cell marker selected from the group consisting of CD20, CD21, CD27, CD38, CD138, any combination thereof, and at least one surface marker selectively found on a pro-B cell, pre-B cell, immature B cell, mature B cell, memory B cell, and plasma cell.

[0143] In some embodiments, the intracellular domain of the CAR comprises dual signaling domains.

[0144] In some embodiments, the costimulatory domain is selected from the group consisting of CD3, CD27, CD28, CD83, CD86, CD127, 4-1BB, 4-1BBL, PD1, PD1L, T cell receptor (TCR), any derivative or variant thereof, any synthetic sequence thereof that has the same functional capability, and any combination thereof.

[0145] In some embodiments, the method further comprises administering a solubilizing agent to prevent dimerization of the CAR.

[0146] In some embodiments, administering the solubilizing agent occurs concurrently with administration of the modified T cell and continues as the modified T cell exerts cytotoxic function against B cells.

[0147] In some embodiments, administering the solubilizing agent is ceased after an onset of an adverse reaction in the subject to the modified T cell.

[0148] In some embodiments, the autoantibody disease or condition is selected from the group consisting of bullous pemphigoid, epidermolysis bullosa acquisita, p200 pemphigoid, linear IgA bullous dermatosis, other pemphigoid group diseases, dermatitis herpetiformis, celiac disease, myasthenia gravis, Goodpasture's syndrome, granulomatosis with polyangiitis and other ANCA+ vasculitidies, autoimmune limbic encephalitis, anti-N-methyl-D-aspartate receptor encephalitis, neuromyelitis optica, autoimmune hemolytic anemia, autoantibody-associated end-organ damage in lupus and other connective tissue diseases (due to anti-dsDNA, anti-Ro, and other autoantibodies), Graves' and Hashimoto's thyroiditis, anti-insulin antibodies in diabetes, anti-insulin receptor antibodies in autoimmune hypoglycemia, cryoglobulinemia, rheumatoid arthritis, multiple sclerosis, Sjogren's syndrome, dermatomyositis, anti-Fc-epsilon receptor antibodies in chronic idiopathic urticaria, anti-folate receptor antibodies, anti-endothelial receptor or anti-adrenergic receptor antibodies in pulmonary arterial hypertension, refractory hypertension, dilated cadiomyopathy, and an autoinflammatory syndrome.

[0149] In some embodiments, the alloantibody disease or condition is an immune reaction in response to an organ transplant, blood transfusion, pregnancy, and protein replacement therapy.

[0150] In some embodiments, the modified T cell is further modified by deleting a gene selected from the group consisting of a T cell receptor (TCR) chain, a major histocompatibility complex protein, and any combination thereof.

[0151] In some embodiments, the modified T cell is further modified before administration to the subject in need thereof.

[0152] In some embodiments, the modified T cell is further modified by inducing a CRISPR/Cas system.

[0153] In one aspect, the invention features a pharmaceutical composition formulated for use in a method described herein, the composition comprising a modified T cell comprising a nucleic acid encoding a suicide gene and a nucleic acid encoding a chimeric antigen receptor (CAR) comprising an anti-B cell binding domain, a transmembrane domain, a costimulatory domain and an intracellular signaling domain.

[0154] In one aspect, the invention features a pharmaceutical composition formulated for use in a method described herein, the composition comprising a modified T cell comprising a nucleic acid encoding a dimerization domain and a chimeric antigen receptor (CAR) comprising an anti-B cell binding domain, a transmembrane domain, a costimulatory domain and an intracellular signaling domain.

[0155] In some embodiments, the suicide gene encodes the amino acid sequence selected from the group consisting of SEQ ID NOs: 3005-3007.

[0156] In some embodiments, the suicide gene further comprises a dimerization domain comprising the amino acid sequence selected from the group consisting of SEQ ID NOs: 3013 and 3014.

[0157] In some embodiments, the dimerization domain comprises the amino acid sequence of SEQ ID NO: 980.

[0158] In some embodiments, the dimerization domain further comprises a furin cleavage site comprising the amino acid sequence of SEQ ID NO: 980.

[0159] In some embodiments, the CAR further comprises a signal peptide.

[0160] In some embodiments, the signal peptide comprises the amino acid sequence of SEQ ID NO: 3035.

[0161] In some embodiments, the composition further comprises an inducing agent to induce activation of the suicide gene.

[0162] In some embodiments, the modified T cell lacks at least one gene encoding a T cell receptor (TCR) chain, and a major histocompatibility complex protein.

[0163] In one aspect, the invention features an isolated nucleic acid sequence comprising a nucleic acid sequence comprising (i) a suicide gene comprising a nucleic acid sequence selected from the group consisting of SEQ ID NOs: 3001-3004; and (ii) a nucleic acid sequence encoding a chimeric antigen receptor (CAR) comprising an anti-B cell binding domain, a transmembrane domain, a costimulatory domain and an intracellular signaling domain.

[0164] In some embodiments, the isolated nucleic acid sequence comprises SEQ ID NO: 3018, 3020, 3024, 3026, 3028 or 3030.

[0165] In one aspect, the invention features an isolated polypeptide comprising (i) an amino acid sequence encoded by a suicide gene wherein the amino acid sequence is selected from the group consisting of SEQ ID NOs: 3005-3007; and (ii) a chimeric antigen receptor (CAR) comprising an anti-B cell binding domain, a transmembrane domain, a costimulatory domain and an intracellular signaling domain.

[0166] In some embodiments, the isolated polypeptide comprises an amino acid sequence of SEQ ID NO: 3019, 3021, 3026, 3028, 3030 or 3034.

[0167] In one aspect, the invention features an isolated nucleic acid sequence comprising (i) a nucleic acid encoding a dimerization domain; and (ii) a chimeric antigen receptor (CAR) comprising an anti-B cell binding domain, a transmembrane domain, a costimulatory domain and an intracellular signaling domain.

[0168] In some embodiments, the dimerization domain comprises the amino acid sequence of SEQ ID NO: 980.

[0169] In some embodiments, the isolated nucleic acid sequence comprises SEQ ID NO: 977 or 3032.

[0170] In one aspect, the invention features an isolated polypeptide comprising (i) a dimerization domain; and (ii) a chimeric antigen receptor (CAR) comprising an anti-B cell binding domain, a transmembrane domain, a costimulatory domain and an intracellular signaling domain.

[0171] In some embodiments, the isolated polypeptide comprises an amino acid sequence of SEQ ID NO: 978 or 3033.

### BRIEF DESCRIPTION OF THE DRAWINGS

[0172] FIG. 1 is a graph showing expression of PCSK (proprotein convertase) family members in primary human T cells. The expression of the PCSK family members was measured by qRT-PCR. RNA was harvested from normal donor T cells on days 0, 4, and 11 following stimulation with anti-CD3/anti-CD28 activation beads. An additional group was supplemented with 100 U/mL IL-2 during culture and RNA was harvested on day 11.

[0173] FIG. 2 is a series of graphs showing compound-dependent CAR expression in Jurkat T cells transduced with an anti-CD19 scFv CAR construct fused to the indicated furin degradation domain (FKBP_{FD}, ERα_{FD}, or DHFR_{FD}) followed by treatment with the corresponding stabilizing compound. FKBP_{FD} transduced cells treated with 1 μM Shield1; ERα_{FD} transduced cells treated with 1 μM Bazedoxifene; DHFR_{FD} transduced cells treated with 1 mM Trimethoprim (TMP). Expression of the anti-CD19 scFv is inducible by the stabilizing compound. Black=UTD (untransduced cells); Gray=construct, no compound; White=construct, with compound.

[0174] FIG. 3 is a graph showing kinetics of CAR expression in Jurkat T cells transduced with an anti-CD19 scFv CAR construct fused to the indicated furin degradation domain (FKBP_{FD} or ERα_{FD}) following addition of a stabilization compound. The FKBP_{FD} transduced cells were treated with 1 μM Shield1 and the ERα_{FD} transduced cells were treated with 1 μM 4-OHT (4-hydroxy tamoxifen) for the time indicated; and CAR expression was determined by FACS.

[0175] FIG. 4 is a series of histograms showing a furin degron domain ERα_{FD} can regulate CAR19 expression in a Bazedoxifene-dependent manner in primary human T cells, and that stabilization is enhanced in the presence of IL-2 in vitro. Primary human T cells were transduced with ERα_{FD} domain fused to an anti-CD19 scFv CAR construct. 100 U/mL IL-2 was added on day 9 following activation with anti-CD3/CD28 stimulation beads. Bazedoxifene was added on day 10, and CAR expression was determined by FACS on day 11.

[0176] FIG. 5 is a pair of graphs showing kinetics of CAR expression following compound washout in primary T cells transduced with CAR construct fused to a furin degradation domain. Primary human T cells were transduced with the indicated furin degradation domain (FKBP_{FD} or ERα_{FD}) fused to an anti-CD19 scFv CAR construct. 100 U/mL IL-2 was added on day 9 following activation with anti-CD3/CD28 stimulation beads. Bazedoxifene was added on day 10, and T cells were frozen on day 11. T cells were thawed, extensively washed, and placed in culture for the times indicated followed by determination of CAR expression by FACS.

[0177] FIG. 6 is a series of plots showing multiple ERα targeting drugs stabilize FurOn CARTs. Jurkat T cells were transduced with ERα_{FD} degradation domain fused to an anti-CD19 scFv CAR construct followed by treatment with the indicated compounds for 24 hours. ERα targeting drugs used were: 10 μM 4-OHT, 1 μM Bazedoxifene, or 1 μM Lasofoxifene.

[0178] FIG. 7 is a graph showing dose response of ERα_{FD} fused CAR expression to Bazedoxifene. Primary human T cells were transduced with ERα_{FD} degradation domain fused to an anti-CD19 scFv CAR construct or the parental CD19 CAR construct. 100 U/mL IL-2 was added on day 9 following activation with anti-CD3/CD28 stimulation beads, and T cells were frozen on day 11. T cells were thawed and placed in culture with Bazedoxifene for 48 hours at the concentrations indicated. CAR expression was determined by FACS.

[0179] FIG. 8 is a pair of graphs showing compound-dependent target specific cell killing by ER-alpha based FurON CART. Primary human T cells were transduced with ERα_{FD} degradation domain fused to an anti-CD19 scFv CAR construct or the parental CD19 CAR construct. 100 U/mL IL-2 and Bazedoxifene were added on day 9 following activation with anti-CD3/CD28 stimulation beads, and T cells were frozen on day 11. T cells were thawed and incubated for 20 hours with the indicated luciferized cell line targets, K562 (CD19−) or NALM6 (CD19+). Percent killing was determined by analysis of remaining luciferase activity.

[0180] FIG. 9 is a pair of graphs showing compound-dependent target specific cell killing by FKBP based FurON CART. Primary human T cells were transduced with FKBP_{FD} furin degradation domain fused to an anti-CD19 scFv CAR construct or the parental CD19 CAR construct. 100 U/mL IL-2 and Shield1 were added on day 9 following activation with anti-CD3/CD28 stimulation beads, and T cells were frozen on day 11. T cells were thawed and incubated for 20 hours with the indicated luciferized cell line targets, K562 (CD19−) or NALM6 (CD19+). Percent killing was determined by analysis of remaining luciferase activity.

[0181] FIG. 10 is a pair of graphs showing compound-dependent cytokine production of ER-alpha FurOn CART. Primary human T cells were transduced with ERα_{FD} furin degradation domain fused to an anti-CD19 scFv CAR construct or the parental CD19 CAR construct. 100 U/mL IL-2 and Bazedoxifene were added on day 9 following activation with anti-CD3/CD28 stimulation beads, and T cells were frozen on day 11. T cells were thawed and incubated with the indicated cell line targets for 20 hrs. Supernatants were harvested and analyzed by cytokine bead array.

[0182] FIG. 11 is a graph showing compound dependent proliferation of ER-alpha FurOn CART. Primary human T cells were transduced with ERα_{FD} degradation domain fused to an anti-CD19 scFv CAR construct or the parental CD19 CAR construct. 100 U/mL IL-2 and Bazedoxifene were added on day 9 following activation with anti-CD3/CD28 stimulation beads, and T cells were frozen on day 11. T cells were thawed and incubated with the indicated cell line targets for 4 days. T cell FurON-CAR numbers were analyzed by FACS.

[0183] FIGS. 12A-12B are representative immunoblots showing the degree of furin cleavage across the various tested furin cleavage sites in ERα-FurON CAR19 constructs. The tested furin cleavage sites are: #105—LQWLEQQVAKRRTKR (SEQ ID NO: 129); #106—GTGAEDPRPSRKRRSLGDVG (SEQ ID NO: 125); #107—GTGAEDPRPSRKRRSLGG (SEQ ID NO: 131); #108—GTGAEDPRPSRKRRSLG (SEQ ID NO: 133); #102—SLNLTESHNSRKKR (SEQ ID NO: 135); #103—GTGAEDPRPSRKRR (SEQ ID NO: 127); #104—CKINGYPKRGRKRR (SEQ ID NO: 137); #73—RTKR (SEQ ID NO: 123).

[0184] FIG. 13 is a table showing the furon (furin degron) domain regulates CAR19 expression in a stabilizing compound-dependent manner in human primary T cells, but had no impact on cell viability and cell proliferation.

[0185] FIG. 14 is a series of line graphs showing that CAR19 with the furin degron domain kills CD19+ tumor cells in a stabilizing compound dose-dependent manner and is noninferior to the parental CAR construct.

[0186] FIG. 15 is a bar graph showing primary human T cells expressing ERαFurON CAR19 secrete IFNγ in the presence of CD19+ tumor cells, in a manner that is stabilizing compound dose-dependent and is noninferior to the parental CAR construct.

[0187] FIG. 16 is a series of bar graphs showing primary human T cells expressing ERαFurON CAR19 proliferate in the presence of CD19+ tumor cells, in a manner that is stabilizing compound-dependent and is noninferior to the parental CAR19 construct.

[0188] FIG. 17 is a series of graphs showing that the tested FurON domains regulate CAR19 expression in Jurkat cells in a compound-dependent manner, regardless of the number of mutations; and no CAR surface expression is detected in the absence of stabilizing compound.

[0189] FIG. 18 is a table showing that the FurON domain regulates CAR19 expression in a stabilizing compound- and IL-2-dependent manner in human primary T cells. No surface CAR expression is detected in the absence of the stabilizing compound bazedoxifene, when the FurON moiety is fused to CAR19.

[0190] FIGS. 19A-19B are line graphs showing that CART cells expressing FurON CAR19, comprising a limited number of mutations in the degron domain, kill CD19+ tumor cells, in a stabilizing compound- and target-dependent manner and is noninferior to the parental CAR construct.

[0191] FIG. 20 is a bar graph showing that CART cells expressing FurON CAR19, comprising a limited number of mutations in the degron domain, secrete cytokines in the presence of CD19+ tumor cells, in a manner that is stabilizing compound-dependent and is noninferior to the parental CAR construct.

[0192] FIG. 21 is a bar graph showing that CD3+ T cells comprising FurON CAR19 proliferate in the presence of CD19+ tumor cells, in a manner that is stabilizing compound-dependent and is noninferior to the parental CAR construct.

[0193] FIG. 22 is a series of graphs showing that the FurON domain regulates CAR123 expression in primary human T cells, in a stabilizing compound-dependent manner.

[0194] FIG. 23 is a series of bar graphs showing that CART cells expressing FurON CAR123 kill CD123+ tumor cells, in a stabilizing compound- and target-dependent manner and is noninferior to the parental CAR construct.

[0195] FIG. 24 is a series of bar graphs showing that CART cells expressing FurON CAR123 secrete cytokines in the presence of CD123+ tumor cells, in a manner that is stabilizing compound-dependent and is noninferior to the parental CAR construct.

[0196] FIG. 25 is a schematic showing an exemplary fusion protein comprising a degradation domain (degron), protease cleavage site, and a second protein domain (a CAR), and the change in degradation of the fusion protein in the presence of a drug, e.g., stabilization compound.

[0197] FIG. 26 is a schematic showing an exemplary fusion protein comprising four copies of an aggregation domain (FKBP12F36M), a protease cleavage site (Furin site), and a second protein domain (ScFv with cytoplasmic tail), and the change in aggregation of the fusion protein in the presence of a compound, e.g., deaggregation compound. This figure is an exemplary illustration of a regulatory on-CAR system, which is yet another embodiment to control the cell surface expression and hence function of the CAR. The CAR is expressed downstream of modified FKBP12 domains, separated by a furin site. Without a solubilizing compound present, the CAR molecules spontaneously aggregate in the endoplasmic reticulum and a reduced number of CAR molecules, e.g., no CAR molecule, can egress to the surface of the T cell. This results in a reduced CAR mediated T cell function, e.g., no CAR mediated T cell function. When the solubilizing compound is present, the CAR aggregation domains are separated and aggregation is prevented. A furin site which is located N-terminal of the scFv becomes accessible for cleavage. After removal of the aggregation domains by furin in the late Golgi apparatus, CAR molecules egress to the surface of the T cells and CAR mediated T cell function can occur.

[0198] FIG. 27 is an illustration of an anti-CD19 or anti-CD20 chimeric antigen receptor construct with a suicide switch (inducible caspase-9 or iCasp9 or iC9), collectively referred to as CD19 sCAR or CD20 sCAR, designed to cause complete but transient B cell depletion. CD19/CD20 sCAR T cells exert their therapeutic effect by depleting B cells upon infusion. Subsequent treatment with small molecule compounds allow caspase-9 to dimerize and activate caspase activity to induce suicide of CD19/CD20 sCAR T cells, thereby allowing B cell repopulation to occur.

[0199] FIG. 28 is an illustration of a reversible caspase-9 suicide cassette, which is another embodiment of a caspase-9 suicide cassette. In the CD19/CD20 revCAR system, caspase-9 is constitutively expressed and spontaneously dimerizes, thus inducing apoptosis as the default in CD19 revCAR T cells. In the presence of a small molecule compound that solubilizes the caspase-9 molecules (i.e., inhibits dimerization), caspase activity is inhibited. Thus, small molecule solubilizer treatment inhibits caspase-9 activity during expansion and infusion of revCAR T cells, and withdrawal of the small molecule solubilizer results in activation of caspase-9 activity and suicide of revCAR T cells, thereby allowing B cell repopulation to occur.

[0200] FIGS. 29A-29F are a series of graphs showing efficient expression of CD19 sCAR, CD19revCAR, and

[0201] CD20 CAR constructs in primary human T cells.

[0202] FIG. 30 is a graph showing specific killing in vitro by CD19 sCARs. Nalm6 is a B cell line that expresses CD19 (wt, wildtype). CD19 sCAR T cells killed CD19+ Nalm6 cells, whereas nontransduced (NTD) T cells or T cells expressing a control sCAR (negative control) did not recognize Nalm6 wt cells.

[0203] FIG. 31 is a graph showing specific and robust elimination of CD19 sCAR T cells after activation of the caspase-9 suicide switch with AP20187. CAR T cells were incubated in the presence of the indicated concentrations of AP20187 for 16 hours at 37° C. Dead cells were detected with live/dead-violet dye and quantified by flow cytometry. Only T cells that expressed the inducible caspase were eliminated (FMC63 iC9 or CD19 sCAR, as well as iC9 control CAR). T cells that did not express control CAR were not affected (nontransduced, NTD, or a control CAR not expressing iC9).

[0204] FIG. 32 is a graph showing that CD19 sCAR T cells expressing the inducible caspase-9 are effective in vivo. NSG mice were injected with 1×10⁶ CD19+ Nalm6 cells. Five days later, mice were treated either with CD19 CAR T cells that express an inducible caspase-9 or with non-transduced control T cells.

[0205] FIG. 33 is a graph showing detection of CD19 sCAR T cells expressing an inducible caspase-9 in the blood and spleen by flow cytometry at the conclusion of the in vivo experiment, indicating engraftment.

[0206] FIG. 34 is a series of graph depicting Killing assay: CD20sCAR, 20revCAR and CD20 onCAR. 4 h chromium release assay to assess killing of Nalm6 cell that were previously engineered to express CD20. Kwt=K562 wild-type cells that are CD20 negative and serve as irrelevant target to demonstrate specific killing. CD20sCAR, 20revCAR and CD20 onCAR show equivalent and specific killing of the CD20+ target cells. On-CAR was tested in presence of 500 nM Shield-1.

[0207] FIG. 35 is a series of histograms demonstrating that the absence of solubilizing FKBP ligand (e.g. shield-1) inhibits CAR function. Shown is the percent reduction of killing in absence of shield-1 compared to killing in presence of 500 nM shield-1. Jeko cells express CD20. At lower E:T ratio's the On-CAR function is strongly inhibited if no FKBP ligand is present.

[0208] FIG. 36 is series of graphs illustrating the modulation of CAR surface expression with FKBP ligand Shield-1. CD20 on-CAR T cells were stained for CAR expression and the mean fluorescence intensity (MFI, assessed by flow cytometry) of the CAR signal was plotted against the Shield-1 concentration. Shield-1 results in a dose-dependent increase in CAR expression. Absence of Shield-1 results in ˜60% reduction of CD20 on-CAR expression (bottom graph).

[0209] FIG. 37 is a series of flow cytometry graphs depicting the titration of Shield-1 in CD19rev CAR. CD19rev CAR T cells (˜38% transduced) were incubated in different doses of Shield-1 for 24 h to assess dose-dependent caspase-9 acitvation. The remaining CAR+ cells were quantified by flow cytometry. In the CD19revCAR system, lower doses of Shield-1 result in higher caspase-9 activation and increased apoptosis (lower proportion of CAR+ cells).

[0210] FIG. 38 is a graph depicting the in vivo assessment of apoptosis efficiency in anti CD19 revCAR T cells. Nalm6 cells (expressing click-beetle luciferase) that are CD19 positive were injected (i.v.) into NSG mice on day 0. On day 4, the mice were injected with CD19 targeting revCAR, 19sCAR, or irrelevant (nontransduced) T cells. Bioluminescence signals of Nalm6 cells were quantified at indicated time points. revCAR treated mice were injected twice with 10 mg/kg aquashield-1 at indicated time points, these injections were anticipated to be insufficient to keep the revCAR T cells alive. Therefore the bioluminescence curve for revCAR and NTD mice is vastly overlapping, indicating sufficient in vivo apoptosis of revCAR T cells.

[0211] FIG. 39 is a series of a schematic timeline and a graph showing the in vivo efficacy of CD19 revCAR T cells. Nalm6 cells (expressing click-beetle luciferase) that are CD19 positive were injected (i.v.) into NSG mice on day 0. On day 4, the osmotic infusion pumps were implanted into the mice to secrete aquashield-1 at a dose of 20 mg/kg/day. CD19rev CAR T cells were injected 4 hours after successful pump implantation (Bottom graph, black arrow). Bioluminescence signals of Nalm6 cells was quantified at indicated time points. The infusion pumps secreted aquashield-1 for 7 days, after which the bioluminescence of Nalm6 cells started to rise (CD19 revCAR curves).

[0212] FIG. 40 is a series of flow cytometry graphs depicting that the suicide activation results in pheripheral depletion of the suicide CAR T cells. Mice were injected with Nalm6 cells and after 5 days were treated with 19 s CAR T cells. CD19s CAR T cells were sorted before injection based on scFV expression. Flow plots show peripheral T cells (CD3+, CD45+) on day 8 and day 26. CD19 sCAR T cells were depleted on day 10 by injection of AP1903 (10 mg/kg). In the AP1903 treated mice, the 2 plots on the left show that T cells are hardly detectable after suicide activation and In the vehicle treated mice, the 2 plots on the right showed stable T cell percentages.

[0213] FIG. 41 is a series of graphs demonstrating that suicide activation results in the peripheral depletion of sCAR T cells. The quantification of T cells was done from several mice. Mice were treated with AP1903 on day 10 to deplete sCAR T cells. After treatment the T cell percentages drop in the AP1903 group as opposed to the vehicle treated group.

[0214] FIG. 42 is a series of images and graphs demonstrating that suicide activation results in the depletion of sCAR T cells from lymphoid organs. Top image sections: spleens of mice were harvested >2 weeks after AP1903 treatment and stained for human CD3; in AP1903 treated mice, T cells are not detectable as opposed to vehicle treated mice. Bottom graph: quantitative PCR was performed to detect sCAR T cells in spleens of AP1903 and vehicle treated mice, demonstrating near-total sCAR absence in most mice.

[0215] FIG. 43 is a series of a schematic timeline and graphs showing that using BT (bone marrow, liver, thymus) mice as host requires ‘universal’ T cells lacking TCR and MHCI expression. T cells were transduced on day 1 after activation with CD19 sCAR encoding lentivirus, the cells were electroporated with Cas9 guide RNA on day 3 (10 ug/10\hat{ }6 cells) and again electroporated on day 4 with guide RNAs targeting the TCRbeta chain and beta-2 microglobulin. Flow plots show sCAR19 expression in 45.2% of the cells 10 days after activation and double knock-out for TCRbeta and beta-2 microglobulin in ˜20% of the cells. The schematic outlines the timeline for T cell production.

[0216] FIG. 44 is a schematic timeline of the experimental design of the in vivo experiment of the present invention. Using BT (bone marrow, liver, and thymus) mice for assessment of universal sCAR function in a non-oncology mouse model. Human fetal bone marrow and thymus were implanted into NSG mice on day −91. Validation of engraftment was done by flow cytometry on day −27. Universal T cells expressing CD19 sCAR T cells were injected on day 0, B cell depletion was assessed on day 10 and mice were treated with AP1903 (3 daily injections with 10 mg/kg). sCAR survival was assessed with qPCR.

[0217] FIG. 45 is a series of flow cytometry graphs depicting that ‘Universal’ sCAR T cells deplete peripheral B cells in non-autologous BT (bone marrow, liver, and thymus) mice. Universal CAR T cells were able to deplete human B cells in a non-cancer humanized mouse model. Flow plots on day 0 and day 10 demonstrate complete absence of CD19 positive cells in the peripheral circulation.

[0218] FIG. 46 is a graph showing that the universal sCAR T cells can be depleted with AP1903 treatment. A quantitative PCR was performed to detect sCAR T cells in peripheral blood of AP1903 and vehicle treated mice, demonstrating near-total sCAR absence in 2/3 mice. A qPCR from peripheral blood WPRE copy number was performed with a gDNA, 4 weeks after AP1903 treatment.

[0219] FIG. 47 is a graph showing that CD19+ NALM6 tumor growth was inhibited in mice infused with CART19, or infused with FurON CART19 and treated with BZA, with or without cotreatment with IL2.

### DETAILED DESCRIPTION

[0220] In general, the invention features the regulated expression of recombinant fusion proteins. This regulation features expression of fusion proteins containing a protein of interest fused to a conditional expression domain, e.g., degradation domain (frequently termed a “degron” in the art) or an aggregation domain. Typically, such degradation domains fold into a stable confirmation only in the presence of a specific ligand (e.g., a soluble ligand or a ligand tethered to the fusion protein). In the absence of such a ligand, the degradation domain assumes a disorganized structure, leading to degradation of the entire fusion protein by native intracellular mechanisms. Typically, such aggregation domains associate into oligomers and/or aggregates in the absence of a specific ligand (e.g., a soluble ligand or a ligand tethered to the fusion protein), leading to the aggregation and/or sequestration of the entire fusion protein. The invention is based on the insight that the degradation domain or aggregation domain can be separated from the protein of interest by a cleavage site (e.g., a protease cleavage site) when expressed under stabilizing conditions (e.g., in the presence of a stabilization compound) or deaggregating conditions (e.g., in the presence of a deaggregation compound). Thus, in the absence of a cognate protease, the fusion protein comprising a degradation domain will escape degradation only in the presence of the stabilizing compound and the fusion protein comprising an aggregation domain will escape aggregation only in the presence of the deaggregation compound. However, once the cleavage site is cleaved by a cognate protease, the presence of a stabilizing compound or deaggregating compound is no longer necessary to allow the protein of interest to escape degradation or aggregation because it is no longer associated with the degradation domain or aggregation domain. Thus, at the time of initial expression, the fusion protein comprising a degradation domain is susceptible to degradation and the fusion protein comprising an aggregation domain is susceptible to aggregation, however, once the cleavage has occurred, the resulting protein of interest can be otherwise indistinguishable from its non-fusion protein counterpart.

[0221] The fusion proteins of the invention thus have three essential elements: a conditional expression domain (e.g., degradation domain or aggregation domain), a domain containing the protein of interest, and a cleavage domain separating the two. Within each of these elements, the specific domains are interchangeable and discussed below. Notably, the fusion protein can be arranged such that conditional expression domain is located either N-terminal or C-terminal to the protein of interest. However, in certain embodiments, the conditional expression domain is N-terminal to the protein of interest. In such embodiments, where the conditional expression domain is a degradation domain, the degradation domain, where disorganized, targets the entire fusion protein for degradation prior to the cleavage of the cleavage domain. In case of a C-terminal fusion, the protease cleavage site has to be oriented towards the compartment where the protease resides. In the particular case of furin, the C-terminal degron needs to face the lumen of the endoplasmic reticulum and Golgi.

### Definitions

[0222] As used herein, the term “conditional expression domain” refers to a domain of a fusion protein that has a first state and a second state, e.g., states of aggregation or conformational states, e.g., states of stabilization/destabilization, or states of folding/misfolding. The first state is associated with, causes, or mediates cell surface expression or extracellular expression of one or more (e.g., all) portions of the fusion protein at a first rate or level and the second state is associated with, causes, or mediates cell surface expression or extracellular expression of one or more (e.g., all) portions of the fusion protein at a second rate or level. Absent an expression compound, when expressed in a cell of interest, a large fraction of the fusion protein comprising a conditional expression domain is not detectable either on the cell surface or extracellularly. Conversely, in the presence of an expression compound, surface expression and/or extracellular expression of one or more (e.g., all) domains of the fusion protein is substantially increased. Thus, a conditional expression domain is identifiable by the following characteristics: (1) it is not naturally occurring in the context of the fusion protein; (2) surface expression and/or extracellular expression is regulated co-translationally or post-translationally; (3) the rate of surface expression and/or extracellular expression is substantially increased in the presence of an expression compound. In embodiments, a conditional expression domain is a degradation domain, for example, as described herein. In other embodiments, a conditional expression domain is an aggregation domain, for example as described herein. In embodiments, the fusion protein comprising the conditional expression domain comprises a chimeric antigen receptor (CAR), for example, as described herein. In embodiments, the fusion protein comprises a heterologous protease cleavage site disposed between the conditional expression domain and a second domain. In such embodiments, in the absence of an expression compound, the protease cleavage site of a large fraction of the fusion proteins is not accessible by the congnate protease, and the cellular fate of the fusion protein is directed by the conditional expression domain. In the presence of an expression compound, the protease cleavage site of a large fraction of the fusion proteins become accessible to the cognate protease, the conditional expression domain is cleaved from the fusion protein, and the cellular fate of the remainder of the fusion protein proceeds as is uninterrupted by the conditional expression domain.

[0223] As used herein, the term “aggregation domain” refers to a domain of a fusion protein that causes intracellular aggregation of the fusion protein. Absent a deaggregation compound, when expressed in a cell of interest, a large fraction of the fusion protein comprising an aggregation domain is present in aggregates which, for example, are sequestered within the cell before reaching mature expression, for example, before being expressed on the surface of the cell or before being secreted extracellulary. Conversely, in the presence of a deaggregation compound, surface expression and/or extracellular expression of one or more (e.g., all) domains of the fusion protein is substantially increased. Thus, an aggregation domain is identifiable by the following characteristics: (1) it is not naturally occurring in the context of the fusion protein; (2) surface expression and/or extracellular expression is regulated co-translationally or post-translationally; (3) the rate of surface expression and/or extracellular expression is substantially increased in the presence of a deaggregation compound. In embodiments, the aggregation domain comprises one or more, e.g., 1, 2, 3, 4, 5, 6, 7, or more repeats of a dimerization domain. In embodiments, the dimerization domain is a homodimerization domain. In other embodiments, the dimerization domain is a heterodimerization domain.

[0224] As used herein, the term “expression compound” refers to a compound that, when added to a cell expressing a fusion protein comprising a conditional expression domain, binds to a conditional expression domain and results in increased surface expression and/or extracellular expression of one or more (e.g., all) domains of the fusion protein. Expression compounds can be naturally occurring or synthetic.

[0225] As used herein, the term “deaggregation compound” refers to a compound that, when added to a cell expressing a fusion protein comprising an aggregation domain, binds to an aggregation domain and results in increased surface expression and/or extracellular expression of one or more (e.g., all) domains of the fusion protein. Deaggregation compounds can be naturally occurring or synthetic.

[0226] By the term “degradation domain” is meant a domain of a fusion protein that assumes a stable conformation when expressed in the presence of a stabilizing compound. Absent the stable conformation when expressed in a cell of interest, a large fraction of degradation domains (and, typically, any protein to which they are fused) will be degraded by endogenous cellular machinery. Notably, a degradation domain is not a naturally occurring domain of a protein but is rather engineered to be unstable absent contact with the stabilizing compound. Thus, a degradation domain is identifiable by the following characteristics: (1) it is not naturally occurring; (2) its expression is regulated co-translationally or post-translationally through increased or decreased degradation rates; (3) the rate of degradation is substantially decreased in the presence of a stabilizing compound. In some embodiments, the degradation domain does not lead to aggregation of the fusion proteins. In some embodiments, absent a stabilizing compound, the degradation domain or other domain of the fusion protein is not substantially detectable in or on the cell.

[0227] As used herein, the terms “deaggregation” and “disaggregation” are used interchangeably.

[0228] As used herein, a “fusion protein” or “chimeric protein” refers to a protein created through the joining of two or more heterologous protein domains into a single, continuous protein.

[0229] By the term “heterologous” is meant a domain (e.g., a protein domain) that has a different origin (i.e., does not naturally occur fused to at least one of the other referenced domains) than one or more protein domains to which it is fused. Furthermore, by “heterologous protease cleavage site” is meant a protease cleavage site that is not cleaved by any domain of the fusion protein in which it is present.

[0230] By “protease” is meant a protein that cleaves another protein based on the presence of a cleavage site in the to-be-cleaved protein.

[0231] By “intracellular protease” is meant a protease that is natively expressed inside a cell of interest.

[0232] By “extracellular protease” is meant a protease that is natively expressed in an organism (e.g., a mammal) and secreted or exposed to the outside of cells (e.g., in the blood or the surface of the skin).

[0233] By “stabilization compound” or “stabilizing compound” is meant a compound that, when added to a cell expressing a degradation domain, stabilizes the degradation domain and decreases the rate at which it is subsequently degraded. Stabilization compounds or stabilizing compounds can be naturally occurring or synthetic.

[0234] The term “a” and “an” refers to one or to more than one (i.e., to at least one) of the grammatical object of the article. By way of example, “an element” means one element or more than one element.

[0235] The term “about” when referring to a measurable value such as an amount, a temporal duration, and the like, is meant to encompass variations of ±20% or in some instances ±10%, or in some instances ±5%, or in some instances ±1%, or in some instances ±0.1% from the specified value, as such variations are appropriate to perform the disclosed methods.

[0236] The term “Chimeric Antigen Receptor” or alternatively a “CAR” refers to a recombinant polypeptide construct comprising at least an extracellular antigen binding domain, a transmembrane domain and a cytoplasmic signaling domain (also referred to herein as “an intracellular signaling domain”) comprising a functional signaling domain derived from a stimulatory molecule as defined below. In some embodiments, the domains in the CAR polypeptide construct are in the same polypeptide chain, e.g., comprise a chimeric fusion protein. In some embodiments, the domains in the CAR polypeptide construct are not contiguous with each other, e.g., are in different polypeptide chains, e.g., in regulatable chimeric antigen receptor (ROAR).

[0237] In one aspect, the stimulatory molecule is the zeta chain associated with the T cell receptor complex. In one aspect, the cytoplasmic signaling domain comprises a primary signaling domain (e.g., a primary signaling domain of CD3-zeta). In one aspect, the cytoplasmic signaling domain further comprises one or more functional signaling domains derived from at least one costimulatory molecule as defined below. In one aspect, the costimulatory molecule is chosen from 4-1BB (i.e., CD137), CD27, ICOS, and/or CD28. In one aspect, the CAR comprises a chimeric fusion protein comprising an extracellular antigen binding domain, a transmembrane domain and an intracellular signaling domain comprising a functional signaling domain derived from a stimulatory molecule. In one aspect, the CAR comprises a chimeric fusion protein comprising an extracellular antigen binding domain, a transmembrane domain and an intracellular signaling domain comprising a functional signaling domain derived from a co-stimulatory molecule and a functional signaling domain derived from a stimulatory molecule. In one aspect, the CAR comprises a chimeric fusion protein comprising an extracellular antigen binding domain, a transmembrane domain and an intracellular signaling domain comprising two functional signaling domains derived from one or more co-stimulatory molecule(s) and a functional signaling domain derived from a stimulatory molecule. In one aspect, the CAR comprises a chimeric fusion protein comprising an extracellular antigen binding domain, a transmembrane domain and an intracellular signaling domain comprising at least two functional signaling domains derived from one or more co-stimulatory molecule(s) and a functional signaling domain derived from a stimulatory molecule. In one aspect the CAR comprises an optional leader sequence at the amino-terminus (N-ter) of the CAR fusion protein. In one aspect, the CAR further comprises a leader sequence at the N-terminus of the extracellular antigen binding domain, wherein the leader sequence is optionally cleaved from the antigen recognition domain (e.g., a scFv) during cellular processing and localization of the CAR to the cellular membrane.

[0238] A CAR that comprises an antigen binding domain (e.g., a scFv, or TCR) that targets, e.g., binds to, a specific antigen X, such as those described herein, is also referred to as XCAR, X-CAR or X-targteing CAR. For example, a CAR that comprises an antigen binding domain that targets CD19 is referred to as CD19CAR.

[0239] The term “signaling domain” refers to the functional portion of a protein which acts by transmitting information within the cell to regulate cellular activity via defined signaling pathways by generating second messengers or functioning as effectors by responding to such messengers. In some aspects, the signaling domain of the CAR described herein is derived from a stimulatory molecule or co-stimulatory molecule described herein, or is a synthesized or engineered signaling domain.

[0240] The term “antibody,” as used herein, refers to a protein, or polypeptide sequence derived from an immunoglobulin molecule which specifically binds with an antigen. Antibodies can be polyclonal or monoclonal, multiple or single chain, or intact immunoglobulins, and may be derived from natural sources or from recombinant sources. Antibodies can be tetramers of immunoglobulin molecules.

[0241] The term “antibody fragment” refers to at least one portion of an intact antibody, or recombinant variants thereof, and refers to the antigen binding domain, e.g., an antigenic determining variable region of an intact antibody, that is sufficient to confer recognition and specific binding of the antibody fragment to a target, such as an antigen. Examples of antibody fragments include, but are not limited to, Fab, Fab′, F(ab′)₂, and Fv fragments, scFv antibody fragments, linear antibodies, single domain antibodies such as sdAb (either VL or VH), camelid VHH domains, and multi-specific antibodies formed from antibody fragments such as a bivalent fragment comprising two Fab fragments linked by a disulfide brudge at the hinge region, and an isolated CDR or other epitope binding fragments of an antibody. An antigen binding fragment can also be incorporated into single domain antibodies, maxibodies, minibodies, nanobodies, intrabodies, diabodies, triabodies, tetrabodies, v-NAR and bis-scFv (see, e.g., Hollinger and Hudson, Nature Biotechnology 23:1126-1136, 2005). Antigen binding fragments can also be grafted into scaffolds based on polypeptides such as a fibronectin type III (Fn3) (see U.S. Pat. No. 6,703,199, which describes fibronectin polypeptide minibodies).

[0242] The term “scFv” refers to a fusion protein comprising at least one antibody fragment comprising a variable region of a light chain and at least one antibody fragment comprising a variable region of a heavy chain, wherein the light and heavy chain variable regions are contiguously linked via a short flexible polypeptide linker, and capable of being expressed as a single chain polypeptide, and wherein the scFv retains the specificity of the intact antibody from which it is derived. Unless specified, as used herein an scFv may have the VL and VH variable regions in either order, e.g., with respect to the N-terminal and C-terminal ends of the polypeptide, the scFv may comprise VL-linker-VH or may comprise VH-linker-VL.

[0243] The term “complementarity determining region” or “CDR,” as used herein, refers to the sequences of amino acids within antibody variable regions which confer antigen specificity and binding affinity. For example, in general, there are three CDRs in each heavy chain variable region (e.g., HCDR1, HCDR2, and HCDR3) and three CDRs in each light chain variable region (LCDR1, LCDR2, and LCDR3). The precise amino acid sequence boundaries of a given CDR can be determined using any of a number of well-known schemes, including those described by Kabat et al. (1991), “Sequences of Proteins of Immunological Interest,” 5th Ed. Public Health Service, National Institutes of Health, Bethesda, Md. (“Kabat” numbering scheme), Al-Lazikani et al., (1997) JMB 273,927-948 (“Chothia” numbering scheme), or a combination thereof. Under the Kabat numbering scheme, in some embodiments, the CDR amino acid residues in the heavy chain variable domain (VH) are numbered 31-35 (HCDR1), 50-65 (HCDR2), and 95-102 (HCDR3); and the CDR amino acid residues in the light chain variable domain (VL) are numbered 24-34 (LCDR1), 50-56 (LCDR2), and 89-97 (LCDR3). Under the Chothia numbering scheme, in some embodiments, the CDR amino acids in the VH are numbered 26-32 (HCDR1), 52-56 (HCDR2), and 95-102 (HCDR3); and the CDR amino acid residues in the VL are numbered 26-32 (LCDR1), 50-52 (LCDR2), and 91-96 (LCDR3). In a combined Kabat and Chothia numbering scheme, in some embodiments, the CDRs correspond to the amino acid residues that are part of a Kabat CDR, a Chothia CDR, or both. For instance, in some embodiments, the CDRs correspond to amino acid residues 26-35 (HCDR1), 50-65 (HCDR2), and 95-102 (HCDR3) in a VH, e.g., a mammalian VH, e.g., a human VH; and amino acid residues 24-34 (LCDR1), 50-56 (LCDR2), and 89-97 (LCDR3) in a VL, e.g., a mammalian VL, e.g., a human VL.

[0244] The portion of the CAR of the invention comprising an antibody or antibody fragment thereof may exist in a variety of forms where the antigen binding domain is expressed as part of a contiguous polypeptide chain including, for example, scFv antibody fragments, linear antibodies, single domain antibodies such as sdAb (either VL or VH), camelid VHH domains, a humanized antibody, a bispecific antibody, an antibody conjugate (Harlow et al., 1999, In: Using Antibodies: A Laboratory Manual, Cold Spring Harbor Laboratory Press, NY; Harlow et al., 1989, In: Antibodies: A Laboratory Manual, Cold Spring Harbor, N.Y.; Houston et al., 1988, Proc. Natl. Acad. Sci. USA 85:5879-5883; Bird et al., 1988, Science 242:423-426). In one aspect, the antigen binding domain of a CAR of the invention comprises an antibody fragment. In a further aspect, the CAR comprises an antibody fragment that comprises a scFv.

[0245] As used herein, the term “binding domain” or “antibody molecule” (also referred to herein as “anti-target (e.g., CD19) binding domain”) refers to a protein, e.g., an immunoglobulin chain or fragment thereof, comprising at least one immunoglobulin variable domain sequence. The term “binding domain” or “antibody molecule” encompasses antibodies and antibody fragments. In an embodiment, an antibody molecule is a multispecific antibody molecule, e.g., it comprises a plurality of immunoglobulin variable domain sequences, wherein a first immunoglobulin variable domain sequence of the plurality has binding specificity for a first epitope and a second immunoglobulin variable domain sequence of the plurality has binding specificity for a second epitope. In an embodiment, a multispecific antibody molecule is a bispecific antibody molecule. A bispecific antibody has specificity for no more than two antigens. A bispecific antibody molecule is characterized by a first immunoglobulin variable domain sequence which has binding specificity for a first epitope and a second immunoglobulin variable domain sequence that has binding specificity for a second epitope.

[0246] The term “antibody heavy chain,” refers to the larger of the two types of polypeptide chains present in antibody molecules in their naturally occurring conformations, and which normally determines the class to which the antibody belongs.

[0247] The term “antibody light chain,” refers to the smaller of the two types of polypeptide chains present in antibody molecules in their naturally occurring conformations. Kappa (K) and lambda (A) light chains refer to the two major antibody light chain isotypes.

[0248] The term “recombinant antibody” refers to an antibody which is generated using recombinant DNA technology, such as, for example, an antibody expressed by a bacteriophage or yeast expression system. The term should also be construed to mean an antibody which has been generated by the synthesis of a DNA molecule encoding the antibody and which DNA molecule expresses an antibody protein, or an amino acid sequence specifying the antibody, wherein the DNA or amino acid sequence has been obtained using recombinant DNA or amino acid sequence technology which is available and well known in the art.

[0249] The term “immunoglobulin” or “Ig,” as used herein is defined as a class of proteins, which function as antibodies. Antibodies expressed by B cells are sometimes referred to as the BCR (B cell receptor) or antigen receptor. The five members included in this class of proteins are IgA, IgG, IgM, IgD, and IgE. IgA is the primary antibody that is present in body secretions, such as saliva, tears, breast milk, gastrointestinal secretions and mucus secretions of the respiratory and genitourinary tracts. IgG is the most common circulating antibody. IgM is the main immunoglobulin produced in the primary immune response in most subjects. It is the most efficient immunoglobulin in agglutination, complement fixation, and other antibody responses, and is important in defense against bacteria and viruses. IgD is the immunoglobulin that has no known antibody function, but may serve as an antigen receptor. IgE is the immunoglobulin that mediates immediate hypersensitivity by causing release of mediators from mast cells and basophils upon exposure to allergen.

[0250] The term “antigen” or “Ag” refers to a molecule that provokes an immune response. This immune response may involve either antibody production, or the activation of specific immunologically-competent cells, or both. The skilled artisan will understand that any macromolecule, including virtually all proteins or peptides, can serve as an antigen. Furthermore, antigens can be derived from recombinant or genomic DNA. A skilled artisan will understand that any DNA, which comprises a nucleotide sequences or a partial nucleotide sequence encoding a protein that elicits an immune response therefore encodes an “antigen” as that term is used herein. Furthermore, one skilled in the art will understand that an antigen need not be encoded solely by a full length nucleotide sequence of a gene. It is readily apparent that the present disclosure includes, but is not limited to, the use of partial nucleotide sequences of more than one gene and that these nucleotide sequences are arranged in various combinations to encode polypeptides that elicit the desired immune response. Moreover, a skilled artisan will understand that an antigen need not be encoded by a “gene” at all. It is readily apparent that an antigen can be generated or can be derived from a biological sample, or might be macromolecule besides a polypeptide. Such a biological sample can include, but is not limited to a tissue sample, a tumor sample, a cell or a fluid with other biological components.

[0251] The term “autoantigen” means, in accordance with the present invention, any self-antigen which is recognized by the immune system as being foreign. Autoantigens comprise, but are not limited to, cellular proteins, phosphoproteins, cellular surface proteins, cellular lipids, nucleic acids, glycoproteins, including cell surface receptors.

[0252] “Autoantibody” refers to an antibody that is produced by a B cell specific for an autoantigen.

[0253] The term “autoantibody disease” as used herein is defined as a disorder that results from an autoantibody immune response. An autoantibody disease is the result of an inappropriate and excessive response production of autoantibodies. Examples of autoantibody diseases include but are not limited to, bullous pemphigoid, epidermolysis bullosa acquisita, p200 pemphigoid, linear IgA bullous dermatosis, other pemphigoid group diseases, dermatitis herpetiformis, celiac disease, myasthenia gravis, Goodpasture's syndrome, granulomatosis with polyangiitis and other ANCA+ vasculitidies, autoimmune limbic encephalitis, anti-N-methyl-D-aspartate receptor encephalitis, neuromyelitis optica, autoimmune hemolytic anemia, autoantibody-associated end-organ damage in lupus and other connective tissue diseases (due to anti-dsDNA, anti-Ro, and other autoantibodies), Graves' and Hashimoto's thyroiditis, anti-insulin antibodies in diabetes, anti-insulin receptor antibodies in autoimmune hypoglycemia, cryoglobulinemia, rheumatoid arthritis, multiple sclerosis, Sjogren's syndrome, dermatomyositis, anti-Fc-epsilon receptor antibodies in chronic idiopathic urticaria, anti-folate receptor antibodies, anti-endothelial receptor or anti-adrenergic receptor antibodies in pulmonary arterial hypertension, refractory hypertension, dilated cadiomyopathy, and autoinflammatory syndromes such as IgG4-related disease, among others.

[0254] The term “autoimmune disease” as used herein is defined as a disorder or condition that results from an antibody mediated autoimmune response against autoantigens. An autoimmune disease results in the production of autoantibodies that are inappropriately produced and/or excessively produced to a self-antigen or autoantigen.

[0255] The term “autologous” refers to any material derived from the same individual to whom it is later to be re-introduced into the individual.

[0256] The term “anti-tumor effect” or “anti-tumor activity” refers to a biological effect which can be manifested by various means, including but not limited to, e.g., a decrease in tumor volume, a decrease in the number of tumor cells, a decrease in the number of metastases, an increase in life expectancy, decrease in tumor cell proliferation, decrease in tumor cell survival, or amelioration of various physiological symptoms associated with the cancerous condition. An “anti-tumor effect” can also be manifested by the ability of the peptides, polynucleotides, cells and antibodies of the invention in prevention of the occurrence of tumor in the first place.

[0257] The term “allogeneic” refers to any material derived from a different animal of the same species as the individual to whom the material is introduced. Two or more individuals are said to be allogeneic to one another when the genes at one or more loci are not identical. In some aspects, allogeneic material from individuals of the same species may be sufficiently unlike genetically to interact antigenically

[0258] The term “xenogeneic” refers to a graft derived from an animal of a different species.

[0259] The term “apheresis” as used herein refers to an extracorporeal process by which the blood of a donor or patient is removed from the donor or patient and passed through an apparatus that separates out selected particular constituent(s) and returns the remainder to the circulation of the donor or patient, e.g., by retransfusion. Thus, in the context of “an apheresis sample” refers to a sample obtained using apheresis.

[0260] The term “cleavage” refers to the breakage of covalent bonds, such as in the backbone of a nucleic acid molecule or the hydrolysis of peptide bonds. Cleavage can be initiated by a variety of methods, including, but not limited to, enzymatic or chemical hydrolysis of a phosphodiester bond. Both single-stranded cleavage and double-stranded cleavage are possible. Double-stranded cleavage can occur as a result of two distinct single-stranded cleavage events. DNA cleavage can result in the production of either blunt ends or staggered ends. In certain embodiments, fusion polypeptides may be used for targeting cleaved double-stranded DNA.

[0261] The term “cancer” or “tumor” refers to a disease characterized by the uncontrolled growth of aberrant cells. Cancer includes all types of cancerous growths or oncogenic processes, metastatic tissues or malignantly transformed cells, tissues or organs irrespective of the histopathologic type or stage of invasiveness. Cancer cells can spread locally or through the bloodstream and lymphatic system to other parts of the body. Examples of various cancers are described herein and include but are not limited to, breast cancer, prostate cancer, ovarian cancer, cervical cancer, skin cancer, pancreatic cancer, colorectal cancer, renal cancer, liver cancer, brain cancer, lymphoma, leukemia, lung cancer and the like.

[0262] The term “CRISPR/CAS,” “clustered regularly interspaced short palindromic repeats system,” or “CRISPR” refers to DNA loci containing short repetitions of base sequences. Each repetition is followed by short segments of spacer DNA from previous exposures to a virus. Bacteria and archaea have evolved adaptive immune defenses termed CRISPR-CRISPR-associated (Cas) systems that use short RNA to direct degradation of foreign nucleic acids. In bacteria, the CRISPR system provides acquired immunity against invading foreign DNA via RNA-guided DNA cleavage.

[0263] In the type II CRISPR/Cas system, short segments of foreign DNA, termed “spacers” are integrated within the CRISPR genomic loci and transcribed and processed into short CRISPR RNA (crRNA). These crRNAs anneal to trans-activating crRNAs (tracrRNAs) and direct sequence-specific cleavage and silencing of pathogenic DNA by Cas proteins. Recent work has shown that target recognition by the Cas9 protein requires a “seed” sequence within the crRNA and a conserved dinucleotide-containing protospacer adjacent motif (PAM) sequence upstream of the crRNA-binding region.

[0264] To direct Cas9 to cleave sequences of interest, crRNA-tracrRNA fusion transcripts, hereafter referred to as “guide RNAs” or “gRNAs” may be designed, from human U6 polymerase III promoter. CRISPR/CAS mediated genome editing and regulation, highlighted its transformative potential for basic science, cellular engineering and therapeutics.

[0265] The term “CRISPRi” refers to a CRISPR system for sequence specific gene repression or inhibition of gene expression, such as at the transcriptional level.

[0266] “Derived from” as that term is used herein, indicates a relationship between a first and a second molecule. It generally refers to structural similarity between the first molecule and a second molecule and does not connotate or include a process or source limitation on a first molecule that is derived from a second molecule. For example, in the case of an intracellular signaling domain that is derived from a CD3zeta molecule, the intracellular signaling domain retains sufficient CD3zeta structure such that is has the required function, namely, the ability to generate a signal under the appropriate conditions. It does not connotate or include a limitation to a particular process of producing the intracellular signaling domain, e.g., it does not mean that, to provide the intracellular signaling domain, one must start with a CD3zeta sequence and delete unwanted sequence, or impose mutations, to arrive at the intracellular signaling domain.

[0267] The phrase “disease associated with expression of a tumor antigen” includes, but is not limited to, a disease associated with expression of a tumor antigen as described herein or condition associated with cells which express a tumor antigen as described herein including, e.g., proliferative diseases such as a cancer or malignancy or a precancerous condition such as a myelodysplasia, a myelodysplastic syndrome or a preleukemia; or a noncancer related indication associated with cells which express a tumor antigen as described herein. In one aspect, a cancer associated with expression of a tumor antigen as described herein is a hematological cancer. In one aspect, a cancer associated with expression of a tumor antigen as described herein is a solid cancer. Further diseases associated with expression of a tumor antigen described herein include, but not limited to, e.g., atypical and/or non-classical cancers, malignancies, precancerous conditions or proliferative diseases associated with expression of a tumor antigen as described herein. Non-cancer related indications associated with expression of a tumor antigen as described herein include, but are not limited to, e.g., autoimmune disease, (e.g., lupus), inflammatory disorders (allergy and asthma) and transplantation.

[0268] The term “conservative sequence modifications” refers to amino acid modifications that do not significantly affect or alter the binding characteristics of the antibody or antibody fragment containing the amino acid sequence. Such conservative modifications include amino acid substitutions, additions and deletions. Modifications can be introduced into an antibody or antibody fragment of the invention by standard techniques known in the art, such as site-directed mutagenesis and PCR-mediated mutagenesis. Conservative amino acid substitutions are ones in which the amino acid residue is replaced with an amino acid residue having a similar side chain. Families of amino acid residues having similar side chains have been defined in the art. These families include amino acids with basic side chains (e.g., lysine, arginine, histidine), acidic side chains (e.g., aspartic acid, glutamic acid), uncharged polar side chains (e.g., glycine, asparagine, glutamine, serine, threonine, tyrosine, cysteine, tryptophan), nonpolar side chains (e.g., alanine, valine, leucine, isoleucine, proline, phenylalanine, methionine), beta-branched side chains (e.g., threonine, valine, isoleucine) and aromatic side chains (e.g., tyrosine, phenylalanine, tryptophan, histidine). Thus, one or more amino acid residues within a CAR of the invention can be replaced with other amino acid residues from the same side chain family and the altered CAR can be tested using the functional assays described herein.

[0269] The term “stimulation,” refers to a primary response induced by binding of a stimulatory molecule (e.g., a TCR/CD3 complex or CAR) with its cognate ligand (or tumor antigen in the case of a CAR) thereby mediating a signal transduction event, such as, but not limited to, signal transduction via the TCR/CD3 complex or signal transduction via the appropriate NK receptor or signaling domains of the CAR. Stimulation can mediate altered expression of certain molecules, such as downregulation of TGF-β, and/or reorganization of cytoskeletal structures, and the like.

[0270] The term “stimulatory molecule,” refers to a molecule expressed by an immune effector cell (e.g., a T cell, NK cell, B cell) that provides the cytoplasmic signaling sequence(s) that regulate activation of the immune effector cell in a stimulatory way for at least some aspect of the immune effector cell signaling pathway, e.g., the T cell signaling pathway. In one aspect, the signal is a primary signal that is initiated by, for instance, binding of a TCR/CD3 complex with an MHC molecule loaded with peptide, and which leads to mediation of a T cell response, including, but not limited to, proliferation, activation, differentiation, and the like. A primary cytoplasmic signaling sequence (also referred to as a “primary signaling domain”) that acts in a stimulatory manner may contain a signaling motif which is known as immunoreceptor tyrosine-based activation motif or ITAM. Examples of an ITAM containing primary cytoplasmic signaling sequence that is of particular use in the invention includes, but is not limited to, those derived from CD3 zeta, common FcR gamma (FCER1G), Fc gamma RIIa, FcR beta (Fc epsilon R1b), CD3 gamma, CD3 delta, CD3 epsilon, CD5, CD22, CD79a, CD79b, CD278 (also known as “ICOS”), FcεRI, DAP10, DAP12, and CD66d. In a specific CAR of the invention, the intracellular signaling domain in any one or more CARs of the invention comprises an intracellular signaling sequence, e.g., a primary signaling sequence of CD3-zeta. In a specific CAR of the invention, the primary signaling sequence of CD3-zeta is the sequence provided as SEQ ID NO:18, or the equivalent residues from a non-human species, e.g., mouse, rodent, monkey, ape and the like. In a specific CAR of the invention, the primary signaling sequence of CD3-zeta is the sequence as provided in SEQ ID NO:20, or the equivalent residues from a non-human species, e.g., mouse, rodent, monkey, ape and the like.

[0271] The term “antigen presenting cell” or “APC” refers to an immune system cell such as an accessory cell (e.g., a B-cell, a dendritic cell, and the like) that displays a foreign antigen complexed with major histocompatibility complexes (MHC's) on its surface. T-cells may recognize these complexes using their T-cell receptors (TCRs). APCs process antigens and present them to T-cells.

[0272] An “intracellular signaling domain,” as the term is used herein, refers to an intracellular portion of a molecule. The intracellular signaling domain generates a signal that promotes an immune effector function of the CAR-expressing cell, e.g., a CART cell or CAR-expressing NK cell. Examples of immune effector function, e.g., in a CART cell or CAR-expressing NK cell, include cytolytic activity and helper activity, including the secretion of cytokines. While the entire intracellular signaling domain can be employed, in many cases it is not necessary to use the entire chain. To the extent that a truncated portion of the intracellular signaling domain is used, such truncated portion may be used in place of the intact chain as long as it transduces the effector function signal. The term intracellular signaling domain is thus meant to include any truncated portion of the intracellular signaling domain sufficient to transduce the effector function signal.

[0273] In an embodiment, the intracellular signaling domain can comprise a primary intracellular signaling domain. Exemplary primary intracellular signaling domains include those derived from the molecules responsible for primary stimulation, or antigen dependent simulation. In an embodiment, the intracellular signaling domain can comprise a costimulatory intracellular domain. Exemplary costimulatory intracellular signaling domains include those derived from molecules responsible for costimulatory signals, or antigen independent stimulation. In an embodiment, the intracellular signaling domain is synthesized or engineered. For example, in the case of a CAR-expressing immune effector cell, e.g., CART cell or CAR-expressing NK cell, a primary intracellular signaling domain can comprise a cytoplasmic sequence of a T cell receptor, a primary intracellular signaling domain can comprise a cytoplasmic sequence of a T cell receptor, and a costimulatory intracellular signaling domain can comprise cytoplasmic sequence from co-receptor or costimulatory molecule.

[0274] A primary intracellular signaling domain can comprise a signaling motif which is known as an immunoreceptor tyrosine-based activation motif or ITAM. Examples of ITAM containing primary cytoplasmic signaling sequences include, but are not limited to, those derived from CD3 zeta, common FcR gamma (FCER1G), Fc gamma RIIa, FcR beta, CD3 gamma, CD3 delta, CD3 epsilon, CD5, CD22, CD79a, CD79b, CD278 (“ICOS”), FcεRI CD66d, DAP10 and DAP12.

[0275] The term “zeta” or alternatively “zeta chain”, “CD3-zeta” or “TCR-zeta” is defined as the protein provided as GenBan Acc. No. BAG36664.1, or the equivalent residues from a non-human species, e.g., mouse, rodent, monkey, ape and the like, and a “zeta stimulatory domain” or alternatively a “CD3-zeta stimulatory domain” or a “TCR-zeta stimulatory domain” is defined as the amino acid residues from the cytoplasmic domain of the zeta chain that are sufficient to functionally transmit an initial signal necessary for T cell activation. In one aspect the cytoplasmic domain of zeta comprises residues 52 through 164 of GenBank Acc. No. BAG36664.1 or the equivalent residues from a non-human species, e.g., mouse, rodent, monkey, ape and the like, that are functional orthologs thereof. In one aspect, the “zeta stimulatory domain” or a “CD3-zeta stimulatory domain” is the sequence provided as SEQ ID NO:18. In one aspect, the “zeta stimulatory domain” or a “CD3-zeta stimulatory domain” is the sequence provided as SEQ ID NO:20. Also encompassed herein are CD3 zeta domains comprising one or more mutations to the amino acid sequences described herein, e.g., SEQ ID NO: 20.

[0276] The term “costimulatory molecule” refers to the cognate binding partner on a T cell that specifically binds with a costimulatory ligand, thereby mediating a costimulatory response by the T cell, such as, but not limited to, proliferation. Costimulatory molecules are cell surface molecules other than antigen receptors or their ligands that are required for an efficient immune response. Costimulatory molecules include, but are not limited to an MHC class I molecule, a TNF receptor protein, an Immunoglobulin-like protein, a cytokine receptor, an integrin, a signaling lymphocytic activation molecule (SLAM protein), an activating NK cell receptor, BTLA, a Toll ligand receptor, OX40, CD2, CD7, CD27, CD28, CD30, CD40, CDS, ICAM-1, LFA-1 (CD11a/CD18), 4-1BB (CD137), B7-H3, CDS, ICAM-1, ICOS (CD278), GITR, BAFFR, LIGHT, HVEM (LIGHTR), KIRDS2, SLAMF7, NKp80 (KLRF1), NKp44, NKp30, NKp46, CD19, CD4, CD8alpha, CD8beta, IL2R beta, IL2R gamma, IL7R alpha, ITGA4, VLA1, CD49a, ITGA4, IA4, CD49D, ITGA6, VLA-6, CD49f, ITGAD, CD11d, ITGAE, CD103, ITGAL, CD11a, LFA-1, ITGAM, CD11 b, ITGAX, CD11c, ITGB1, CD29, ITGB2, CD18, LFA-1, ITGB7, NKG2D, NKG2C, TNFR2, TRANCE/RANKL, DNAM1 (CD226), SLAMF4 (CD244, 2B4), CD84, CD96 (Tactile), CEACAM1, CRTAM, Ly9 (CD229), CD160 (BY55), PSGL1, CD100 (SEMA4D), CD69, SLAMF6 (NTB-A, Ly108), SLAM (SLAMF1, CD150, IPO-3), BLAME (SLAMF8), SELPLG (CD162), LTBR, LAT, GADS, SLP-76, PAG/Cbp, CD19a, and a ligand that specifically binds with CD83.

[0277] A costimulatory intracellular signaling domain or costimulatory signaling domain can be the intracellular portion of a costimulatory molecule. The intracellular signaling domain can comprise the entire intracellular portion, or the entire native intracellular signaling domain, of the molecule from which it is derived, or a functional fragment thereof.

[0278] The term “4-1BB” refers to a member of the TNFR superfamily with an amino acid sequence provided as GenBank Acc. No. AAA62478.2, or the equivalent residues from a non-human species, e.g., mouse, rodent, monkey, ape and the like; and a “4-1BB costimulatory domain” is defined as amino acid residues 214-255 of GenBank Acc. No. AAA62478.2, or the equivalent residues from a non-human species, e.g., mouse, rodent, monkey, ape and the like. In one aspect, the “4-1BB costimulatory domain” is the sequence provided as SEQ ID NO:14 or the equivalent residues from a non-human species, e.g., mouse, rodent, monkey, ape and the like.

[0279] The term “immune response” as used herein is defined as a cellular response to an antigen that occurs when lymphocytes identify antigenic molecules as foreign and induce the formation of antibodies and/or activate lymphocytes to remove the antigen.

[0280] When “an immunologically effective amount,” “an autoimmune disease-inhibiting effective amount,” or “therapeutic amount” is indicated, the precise amount of the compositions of the present invention to be administered can be determined by a physician or researcher with consideration of individual differences in age, weight, tumor size, extent of infection or metastasis, and condition of the patient (subject).

[0281] “Immune effector cell,” as that term is used herein, refers to a cell that is involved in an immune response, e.g., in the promotion of an immune effector response. Examples of immune effector cells include T cells, e.g., alpha/beta T cells and gamma/delta T cells, B cells, natural killer (NK) cells, natural killer T (NKT) cells, mast cells, and myeloid-derived phagocytes.

[0282] “Immune effector function or immune effector response,” as that term is used herein, refers to function or response, e.g., of an immune effector cell, that enhances or promotes an immune attack of a target cell. E.g., an immune effector function or response refers a property of a T or NK cell that promotes killing or the inhibition of growth or proliferation, of a target cell. In the case of a T cell, primary stimulation and co-stimulation are examples of immune effector function or response.

[0283] The term “effector function” refers to a specialized function of a cell. Effector function of a T cell, for example, may be cytolytic activity or helper activity including the secretion of cytokines.

[0284] The term “encoding” refers to the inherent property of specific sequences of nucleotides in a polynucleotide, such as a gene, a cDNA, or an mRNA, to serve as templates for synthesis of other polymers and macromolecules in biological processes having either a defined sequence of nucleotides (e.g., rRNA, tRNA and mRNA) or a defined sequence of amino acids and the biological properties resulting therefrom. Thus, a gene, cDNA, or RNA, encodes a protein if transcription and translation of mRNA corresponding to that gene produces the protein in a cell or other biological system. Both the coding strand, the nucleotide sequence of which is identical to the mRNA sequence and is usually provided in sequence listings, and the non-coding strand, used as the template for transcription of a gene or cDNA, can be referred to as encoding the protein or other product of that gene or cDNA.

[0285] Unless otherwise specified, a “nucleotide sequence encoding an amino acid sequence” includes all nucleotide sequences that are degenerate versions of each other and that encode the same amino acid sequence. The phrase nucleotide sequence that encodes a protein or a RNA may also include introns to the extent that the nucleotide sequence encoding the protein may in some version contain an intron(s).

[0286] The term “effective amount” or “therapeutically effective amount” are used interchangeably herein, and refer to an amount of a compound, formulation, material, or composition, as described herein effective to achieve a particular biological result.

[0287] The term “endogenous” refers to any material from or produced inside an organism, cell, tissue or system.

[0288] The term “exogenous” refers to any material introduced from or produced outside an organism, cell, tissue or system.

[0289] The term “expression” refers to the transcription and/or translation of a particular nucleotide sequence driven by a promoter.

[0290] The term “transfer vector” refers to a composition of matter which comprises an isolated nucleic acid and which can be used to deliver the isolated nucleic acid to the interior of a cell. Numerous vectors are known in the art including, but not limited to, linear polynucleotides, polynucleotides associated with ionic or amphiphilic compounds, plasmids, and viruses. Thus, the term “transfer vector” includes an autonomously replicating plasmid or a virus. The term should also be construed to further include non-plasmid and non-viral compounds which facilitate transfer of nucleic acid into cells, such as, for example, a polylysine compound, liposome, and the like. Examples of viral transfer vectors include, but are not limited to, adenoviral vectors, adeno-associated virus vectors, retroviral vectors, lentiviral vectors, and the like.

[0291] The term “expression vector” refers to a vector comprising a recombinant polynucleotide comprising expression control sequences operatively linked to a nucleotide sequence to be expressed. An expression vector comprises sufficient cis-acting elements for expression; other elements for expression can be supplied by the host cell or in an in vitro expression system. Expression vectors include all those known in the art, including cosmids, plasmids (e.g., naked or contained in liposomes) and viruses (e.g., lentiviruses, retroviruses, adenoviruses, and adeno-associated viruses) that incorporate the recombinant polynucleotide.

[0292] The term “lentivirus” refers to a genus of the Retroviridae family. Lentiviruses are unique among the retroviruses in being able to infect non-dividing cells; they can deliver a significant amount of genetic information into the DNA of the host cell, so they are one of the most efficient methods of a gene delivery vector. HIV, SIV, and FIV are all examples of lentiviruses.

[0293] The term “lentiviral vector” refers to a vector derived from at least a portion of a lentivirus genome, including especially a self-inactivating lentiviral vector as provided in Milone et al., Mol. Ther. 17(8): 1453-1464 (2009). Other examples of lentivirus vectors that may be used in the clinic, include but are not limited to, e.g., the LENTIVECTOR® gene delivery technology from Oxford BioMedica, the LENTIMAX™ vector system from Lentigen and the like. Nonclinical types of lentiviral vectors are also available and would be known to one skilled in the art.

[0294] The term “homologous” or “identity” refers to the subunit sequence identity between two polymeric molecules, e.g., between two nucleic acid molecules, such as, two DNA molecules or two RNA molecules, or between two polypeptide molecules. When a subunit position in both of the two molecules is occupied by the same monomeric subunit; e.g., if a position in each of two DNA molecules is occupied by adenine, then they are homologous or identical at that position. The homology between two sequences is a direct function of the number of matching or homologous positions; e.g., if half (e.g., five positions in a polymer ten subunits in length) of the positions in two sequences are homologous, the two sequences are 50% homologous; if 90% of the positions (e.g., 9 of 10), are matched or homologous, the two sequences are 90% homologous.

[0295] “Humanized” forms of non-human (e.g., murine) antibodies are chimeric immunoglobulins, immunoglobulin chains or antibody fragments thereof (such as Fv, Fab, Fab′, F(ab′)2 or other antigen-binding subsequences of antibodies) which contain minimal sequence derived from non-human immunoglobulin. For the most part, humanized antibodies and antibody fragments thereof are human immunoglobulins (recipient antibody or antibody fragment) in which residues from a complementary-determining region (CDR) of the recipient are replaced by residues from a CDR of a non-human species (donor antibody) such as mouse, rat or rabbit having the desired specificity, affinity, and capacity. In some instances, Fv framework region (FR) residues of the human immunoglobulin are replaced by corresponding non-human residues. Furthermore, a humanized antibody/antibody fragment can comprise residues which are found neither in the recipient antibody nor in the imported CDR or framework sequences. These modifications can further refine and optimize antibody or antibody fragment performance. In general, the humanized antibody or antibody fragment thereof will comprise substantially all of at least one, and typically two, variable domains, in which all or substantially all of the CDR regions correspond to those of a non-human immunoglobulin and all or a significant portion of the FR regions are those of a human immunoglobulin sequence. The humanized antibody or antibody fragment can also comprise at least a portion of an immunoglobulin constant region (Fc), typically that of a human immunoglobulin. For further details, see Jones et al., Nature, 321: 522-525, 1986; Reichmann et al., Nature, 332: 323-329, 1988; Presta, Curr. Op. Struct. Biol., 2: 593-596, 1992.

[0296] “Fully human” refers to an immunoglobulin, such as an antibody or antibody fragment, where the whole molecule is of human origin or consists of an amino acid sequence identical to a human form of the antibody or immunoglobulin.

[0297] The term “isolated” means altered or removed from the natural state. For example, a nucleic acid or a peptide naturally present in a living animal is not “isolated,” but the same nucleic acid or peptide partially or completely separated from the coexisting materials of its natural state is “isolated.” An isolated nucleic acid or protein can exist in substantially purified form, or can exist in a non-native environment such as, for example, a host cell.

[0298] In the context of the present disclosure, the following abbreviations for the commonly occurring nucleic acid bases are used. “A” refers to adenosine, “C” refers to cytosine, “G” refers to guanosine, “T” refers to thymidine, and “U” refers to uridine.

[0299] The term “operably linked” or “transcriptional control” refers to functional linkage between a regulatory sequence and a heterologous nucleic acid sequence resulting in expression of the latter. For example, a first nucleic acid sequence is operably linked with a second nucleic acid sequence when the first nucleic acid sequence is placed in a functional relationship with the second nucleic acid sequence. For instance, a promoter is operably linked to a coding sequence if the promoter affects the transcription or expression of the coding sequence. Operably linked DNA sequences can be contiguous with each other and, e.g., where necessary to join two protein coding regions, are in the same reading frame.

[0300] The term “parenteral” administration of an immunogenic composition includes, e.g., subcutaneous (s.c.), intravenous (i.v.), intramuscular (i.m.), or intrasternal injection, intratumoral, or infusion techniques.

[0301] The term “nucleic acid” or “polynucleotide” refers to deoxyribonucleic acids (DNA) or ribonucleic acids (RNA) and polymers thereof in either single- or double-stranded form. Unless specifically limited, the term encompasses nucleic acids containing known analogues of natural nucleotides that have similar binding properties as the reference nucleic acid and are metabolized in a manner similar to naturally occurring nucleotides. Unless otherwise indicated, a particular nucleic acid sequence also implicitly encompasses conservatively modified variants thereof (e.g., degenerate codon substitutions), alleles, orthologs, SNPs, and complementary sequences as well as the sequence explicitly indicated. Specifically, degenerate codon substitutions may be achieved by generating sequences in which the third position of one or more selected (or all) codons is substituted with mixed-base and/or deoxyinosine residues (Batzer et al., Nucleic Acid Res. 19:5081 (1991); Ohtsuka et al., J. Biol. Chem. 260:2605-2608 (1985); and Rossolini et al., Mol. Cell. Probes 8:91-98 (1994)).

[0302] The terms “peptide,” “polypeptide,” and “protein” are used interchangeably, and refer to a compound comprised of amino acid residues covalently linked by peptide bonds. A protein or peptide must contain at least two amino acids, and no limitation is placed on the maximum number of amino acids that can comprise a protein's or peptide's sequence. Polypeptides include any peptide or protein comprising two or more amino acids joined to each other by peptide bonds. As used herein, the term refers to both short chains, which also commonly are referred to in the art as peptides, oligopeptides and oligomers, for example, and to longer chains, which generally are referred to in the art as proteins, of which there are many types. “Polypeptides” include, for example, biologically active fragments, substantially homologous polypeptides, oligopeptides, homodimers, heterodimers, variants of polypeptides, modified polypeptides, derivatives, analogs, fusion proteins, among others. A polypeptide includes a natural peptide, a recombinant peptide, or a combination thereof.

[0303] The term “promoter” refers to a DNA sequence recognized by the synthetic machinery of the cell, or introduced synthetic machinery, required to initiate the specific transcription of a polynucleotide sequence.

[0304] The term “promoter/regulatory sequence” refers to a nucleic acid sequence which is required for expression of a gene product operably linked to the promoter/regulatory sequence. In some instances, this sequence may be the core promoter sequence and in other instances, this sequence may also include an enhancer sequence and other regulatory elements which are required for expression of the gene product. The promoter/regulatory sequence may, for example, be one which expresses the gene product in a tissue specific manner.

[0305] The term “constitutive” promoter refers to a nucleotide sequence which, when operably linked with a polynucleotide which encodes or specifies a gene product, causes the gene product to be produced in a cell under most or all physiological conditions of the cell.

[0306] The term “inducible” promoter refers to a nucleotide sequence which, when operably linked with a polynucleotide which encodes or specifies a gene product, causes the gene product to be produced in a cell substantially only when an inducer which corresponds to the promoter is present in the cell.

[0307] The term “tissue-specific” promoter refers to a nucleotide sequence which, when operably linked with a polynucleotide encodes or specified by a gene, causes the gene product to be produced in a cell substantially only if the cell is a cell of the tissue type corresponding to the promoter.

[0308] The terms “cancer associated antigen” or “tumor antigen” interchangeably refers to a molecule (typically a protein, carbohydrate or lipid) that is expressed on the surface of a cancer cell, either entirely or as a fragment (e.g., MHC/peptide), and which is useful for the preferential targeting of a pharmacological agent to the cancer cell. In some embodiments, a tumor antigen is a marker expressed by both normal cells and cancer cells, e.g., a lineage marker, e.g., CD19 on B cells. In some embodiments, a tumor antigen is a cell surface molecule that is overexpressed in a cancer cell in comparison to a normal cell, for instance, 1-fold over expression, 2-fold overexpression, 3-fold overexpression or more in comparison to a normal cell. In some embodiments, a tumor antigen is a cell surface molecule that is inappropriately synthesized in the cancer cell, for instance, a molecule that contains deletions, additions or mutations in comparison to the molecule expressed on a normal cell. In some embodiments, a tumor antigen will be expressed exclusively on the cell surface of a cancer cell, entirely or as a fragment (e.g., MHC/peptide), and not synthesized or expressed on the surface of a normal cell. In some embodiments, exemplary tumor antigens include: CD19; CD123; CD22; CD30; CD171; CS-1; C-type lectin-like molecule-1, CD33; epidermal growth factor receptor variant III (EGFRvIII); ganglioside G2 (GD2); ganglioside GD3; TNF receptor family member B cell maturation (BCMA); Tn antigen ((Tn Ag) or (GalNAcα-Ser/Thr)); prostate-specific membrane antigen (PSMA); Receptor tyrosine kinase-like orphan receptor 1 (ROR1); Fms-Like Tyrosine Kinase 3 (FLT3); Tumor-associated glycoprotein 72 (TAG72); CD38; CD44v6; Carcinoembryonic antigen (CEA); Epithelial cell adhesion molecule (EPCAM); B7H3 (CD276); KIT (CD117); Interleukin-13 receptor subunit alpha-2; Mesothelin; Interleukin 11 receptor alpha (IL-11Ra); prostate stem cell antigen (PSCA); Protease Serine 21; vascular endothelial growth factor receptor 2 (VEGFR2); Lewis(Y) antigen; CD24; Platelet-derived growth factor receptor beta (PDGFR-beta); Stage-specific embryonic antigen-4 (SSEA-4); CD20; Folate receptor alpha; Receptor tyrosine-protein kinase ERBB2 (Her2/neu); Mucin 1, cell surface associated (MUC1); epidermal growth factor receptor (EGFR); neural cell adhesion molecule (NCAM); Prostase; prostatic acid phosphatase (PAP); elongation factor 2 mutated (ELF2M); Ephrin B2; fibroblast activation protein alpha (FAP); insulin-like growth factor 1 receptor (IGF-I receptor), carbonic anhydrase IX (CAIX); Proteasome (Prosome, Macropain) Subunit, Beta Type, 9 (LMP2); glycoprotein 100 (gp100); oncogene fusion protein consisting of breakpoint cluster region (BCR) and Abelson murine leukemia viral oncogene homolog 1 (Abl) (bcr-abl); tyrosinase; ephrin type-A receptor 2 (EphA2); Fucosyl GM1; sialyl Lewis adhesion molecule (sLe); ganglioside GM3; transglutaminase 5 (TGS5); high molecular weight-melanoma-associated antigen (HMWMAA); o-acetyl-GD2 ganglioside (OAcGD2); Folate receptor beta; tumor endothelial marker 1 (TEM1/CD248); tumor endothelial marker 7-related (TEM7R); claudin 6 (CLDN6); thyroid stimulating hormone receptor (TSHR); G protein-coupled receptor class C group 5, member D (GPRC5D); chromosome X open reading frame 61 (CXORF61); CD97; CD179a; anaplastic lymphoma kinase (ALK); Polysialic acid; placenta-specific 1 (PLAC1); hexasaccharide portion of globoH glycoceramide (GloboH); mammary gland differentiation antigen (NY-BR-1); uroplakin 2 (UPK2); Hepatitis A virus cellular receptor 1 (HAVCR1); adrenoceptor beta 3 (ADRB3); pannexin 3 (PANX3); G protein-coupled receptor 20 (GPR20); lymphocyte antigen 6 complex, locus K 9 (LY6K); Olfactory receptor 51E2 (OR51E2); TCR Gamma Alternate Reading Frame Protein (TARP); Wilms tumor protein (WT1); Cancer/testis antigen 1 (NY-ESO-1); Cancer/testis antigen 2 (LAGE-1a); Melanoma-associated antigen 1 (MAGE-A1); ETS translocation-variant gene 6, located on chromosome 12p (ETV6-AML); sperm protein 17 (SPA17); X Antigen Family, Member 1A (XAGE1); angiopoietin-binding cell surface receptor 2 (Tie 2); melanoma cancer testis antigen-1 (MAD-CT-1); melanoma cancer testis antigen-2 (MAD-CT-2); Fos-related antigen 1; tumor protein p53 (p53); p53 mutant; prostein; surviving; telomerase; prostate carcinoma tumor antigen-1, melanoma antigen recognized by T cells 1; Rat sarcoma (Ras) mutant; human Telomerase reverse transcriptase (hTERT); sarcoma translocation breakpoints; melanoma inhibitor of apoptosis (ML-IAP); ERG (transmembrane protease, serine 2 (TMPRSS2) ETS fusion gene); N-Acetyl glucosaminyl-transferase V (NA17); paired box protein Pax-3 (PAX3); Androgen receptor; Cyclin B1; v-myc avian myelocytomatosis viral oncogene neuroblastoma derived homolog (MYCN); Ras Homolog Family Member C (RhoC); Tyrosinase-related protein 2 (TRP-2); Cytochrome P450 1B1 (CYP1B1); CCCTC-Binding Factor (Zinc Finger Protein)-Like, Squamous Cell Carcinoma Antigen Recognized By T Cells 3 (SART3); Paired box protein Pax-5 (PAX5); proacrosin binding protein sp32 (OY-TES1); lymphocyte-specific protein tyrosine kinase (LCK); A kinase anchor protein 4 (AKAP-4); synovial sarcoma, X breakpoint 2 (SSX2); Receptor for Advanced Glycation Endproducts (RAGE-1); renal ubiquitous 1 (RU1); renal ubiquitous 2 (RU2); legumain; human papilloma virus E6 (HPV E6); human papilloma virus E7 (HPV E7); intestinal carboxyl esterase; heat shock protein 70-2 mutated (mut hsp70-2); CD79a; CD79b; CD72; Leukocyte-associated immunoglobulin-like receptor 1 (LAIR1); Fc fragment of IgA receptor (FCAR or CD89); Leukocyte immunoglobulin-like receptor subfamily A member 2 (LILRA2); CD300 molecule-like family member f (CD300LF); C-type lectin domain family 12 member A (CLEC12A); bone marrow stromal cell antigen 2 (BST2); EGF-like module-containing mucin-like hormone receptor-like 2 (EMR2); lymphocyte antigen 75 (LY75); Glypican-3 (GPC3); Fc receptor-like 5 (FCRL5); immunoglobulin lambda-like polypeptide 1 (IGLL1); TNF receptor family member; Fms-Like Tyrosine Kinase 3 (FL T3); CD10; CD19; CD20; CD21; CD22; CD23; CD24; CD25; CD37; CD38; CD53; CD72; CD73; CD74; CD75; CD77; CD79a; CD79b; CD80; CD81; CD82; CD83; CD84; CD85; ROR1; BCMA; CD86; CD179b; CD1a; CD1b; CD1c; CD1d; CD2; CD5; CD6; CD9; CD11a; CD11 b; CD11c; CD17; CD18; CD26; CD27; CD29; CD30; CD31; CD32a; CD32b; CD35; CD38; CD39; CD40; CD44; CD45; CD45RA; CD45RB; CD45RC; CD45RO; CD46; CD47; CD48; CD49b; CD49c; CD49d; CD50; CD52; CD54; CD55; CD58; CD60a; CD62L; CD63; CD63; CD68 CD69; CD70; CD85E; CD85I; CD85J; CD92; CD95; CD97; CD98; CD99; CD100; CD102; CD108; CD119; CD120a; CD120b; CD121b; CD122; CD124; CD125; CD126; CD130; CD132; CD137; CD138; CD139; CD147; CD148; CD150; CD152; CD162; CD164; CD166; CD167a; CD170; CD175; CD175s; CD180; CD184; CD185; CD192; CD196; CD197; CD200; CD205; CD210a; CDw210b; CD212; CD213a1; CD213a2; CD215; CD217; CD218a; CD218b; CD220; CD221; CD224; CD225; CD226; CD227; CD229; CD230; CD232; CD252; CD253; CD257; CD258; CD261; CD262; CD263; CD264; CD267; CD268; CD269; CD270; CD272; CD274; CD275; CD277; CD279; CD283; CD289; CD290; CD295; CD298; CD300a; CD300c; CD305; CD306; CD307a; CD307b; CD307c; CD307d; CD307e; CD314; CD315; CD316; CD317; CD319; CD321; CD327; CD328; CD329; CD338; CD351; CD352; CD353; CD354; CD355; CD357; CD358; CD360; CD361; CD362; CD363; and a peptide of any of these antigens presented on MHC. Particularly preferred antigens include: CD19, CD20, CD22, FcRn5, FcRn2, BCMA, CS-1, CD138, CLDN6, mesothelin, EGFRvIII, CD123, CD33 and CLL-1. In some embodiments, the CARs of the present disclosure includes CARs comprising an antigen binding domain (e.g., antibody or antibody fragment) that binds to a MHC presented peptide. Normally, peptides derived from endogenous proteins fill the pockets of Major histocompatibility complex (MHC) class I molecules, and are recognized by T cell receptors (TCRs) on CD8+ T lymphocytes. The MHC class I complexes are constitutively expressed by all nucleated cells. In cancer, virus-specific and/or tumor-specific peptide/MHC complexes represent a unique class of cell surface targets for immunotherapy. TCR-like antibodies targeting peptides derived from viral or tumor antigens in the context of human leukocyte antigen (HLA)-A1 or HLA-A2 have been described (see, e.g., Sastry et al., J Virol. 2011 85(5):1935-1942; Sergeeva et al., Blood, 2011 117(16):4262-4272; Verma et al., J Immunol 2010 184(4):2156-2165; Willemsen et al., Gene Ther 2001 8(21):1601-1608; Dao et al., Sci Transl Med 2013 5(176):176ra33; Tassev et al., Cancer Gene Ther 2012 19(2):84-100). For example, TCR-like antibody can be identified from screening a library, such as a human scFv phage displayed library. Accordingly, the present disclosure provides CARs that comprise an antigen binding domain that binds to a MHC presented peptide of a molecule selected from the group of WT1, NY-ESO-1, LAGE-1a, MAGE-A1 and RAGE-1.

[0309] The term “flexible polypeptide linker” or “linker” as used in the context of a scFv refers to a peptide linker that consists of amino acids such as glycine and/or serine residues used alone or in combination, to link variable heavy and variable light chain regions together. In one embodiment, the flexible polypeptide linker is a Gly/Ser linker and comprises the amino acid sequence (Gly-Gly-Gly-Ser)n, where n is a positive integer equal to or greater than 1, for example, n=1, n=2, n=3, n=4, n=5 and n=6, n=7, n=8, n=9 or n=10 (SEQ ID NO:28). In one embodiment, the flexible polypeptide linkers include, but are not limited to, (Gly4 Ser)4 (SEQ ID NO:29) or (Gly4 Ser)3 (SEQ ID NO:30). In another embodiment, the linkers include multiple repeats of (Gly2Ser), (GlySer) or (Gly3Ser) (SEQ ID NO:31). Also included within the scope of the invention are linkers described in WO2012/138475, incorporated herein by reference).

[0310] As used herein, a 5′ cap (also termed an RNA cap, an RNA 7-methylguanosine cap or an RNA m⁷G cap) is a modified guanine nucleotide that has been added to the “front” or 5′ end of a eukaryotic messenger RNA shortly after the start of transcription. The 5′ cap consists of a terminal group which is linked to the first transcribed nucleotide. Its presence is critical for recognition by the ribosome and protection from RNases. Cap addition is coupled to transcription, and occurs co-transcriptionally, such that each influences the other. Shortly after the start of transcription, the 5′ end of the mRNA being synthesized is bound by a cap-synthesizing complex associated with RNA polymerase. This enzymatic complex catalyzes the chemical reactions that are required for mRNA capping. Synthesis proceeds as a multi-step biochemical reaction. The capping moiety can be modified to modulate functionality of mRNA such as its stability or efficiency of translation.

[0311] As used herein, “in vitro transcribed RNA” refers to RNA, preferably mRNA, that has been synthesized in vitro. Generally, the in vitro transcribed RNA is generated from an in vitro transcription vector. The in vitro transcription vector comprises a template that is used to generate the in vitro transcribed RNA.

[0312] As used herein, a “poly(A)” is a series of adenosines attached by polyadenylation to the mRNA. In the preferred embodiment of a construct for transient expression, the polyA is between 50 and 5000 (SEQ ID NO: 32), preferably greater than 64, more preferably greater than 100, most preferably greater than 300 or 400. Poly(A) sequences can be modified chemically or enzymatically to modulate mRNA functionality such as localization, stability or efficiency of translation.

[0313] As used herein, “polyadenylation” refers to the covalent linkage of a polyadenylyl moiety, or its modified variant, to a messenger RNA molecule. In eukaryotic organisms, most messenger RNA (mRNA) molecules are polyadenylated at the 3′ end. The 3′ poly(A) tail is a long sequence of adenine nucleotides (often several hundred) added to the pre-mRNA through the action of an enzyme, polyadenylate polymerase. In higher eukaryotes, the poly(A) tail is added onto transcripts that contain a specific sequence, the polyadenylation signal. The poly(A) tail and the protein bound to it aid in protecting mRNA from degradation by exonucleases. Polyadenylation is also important for transcription termination, export of the mRNA from the nucleus, and translation. Polyadenylation occurs in the nucleus immediately after transcription of DNA into RNA, but additionally can also occur later in the cytoplasm. After transcription has been terminated, the mRNA chain is cleaved through the action of an endonuclease complex associated with RNA polymerase. The cleavage site is usually characterized by the presence of the base sequence AAUAAA near the cleavage site. After the mRNA has been cleaved, adenosine residues are added to the free 3′ end at the cleavage site.

[0314] As used herein, “transient” refers to expression of a non-integrated transgene for a period of hours, days or weeks, wherein the period of time of expression is less than the period of time for expression of the gene if integrated into the genome or contained within a stable plasmid replicon in the host cell.

[0315] As used herein, the terms “treat”, “treatment” and “treating” refer to the reduction or amelioration of the progression, severity and/or duration of a proliferative disorder, or the amelioration of one or more symptoms (preferably, one or more discernible symptoms) of a proliferative disorder resulting from the administration of one or more therapies (e.g., one or more therapeutic agents such as a CAR of the invention). In specific embodiments, the terms “treat,” “treatment” and “treating” refer to the amelioration of at least one measurable physical parameter of a proliferative disorder, such as growth of a tumor, not necessarily discernible by the patient. In other embodiments the terms “treat”, “treatment” and “treating”-refer to the inhibition of the progression of a proliferative disorder, either physically by, e.g., stabilization of a discernible symptom, physiologically by, e.g., stabilization of a physical parameter, or both. In other embodiments the terms “treat”, “treatment” and “treating” refer to the reduction or stabilization of tumor size or cancerous cell count.

[0316] The term “signal transduction pathway” refers to the biochemical relationship between a variety of signal transduction molecules that play a role in the transmission of a signal from one portion of a cell to another portion of a cell. The phrase “cell surface receptor” includes molecules and complexes of molecules capable of receiving a signal and transmitting signal across the membrane of a cell.

[0317] The term “subject” is intended to include living organisms in which an immune response can be elicited (e.g., mammals, human). A “subject” or “patient,” as used therein, may be a human or non-human mammal. Non-human mammals include, for example, livestock and pets, such as ovine, bovine, porcine, canine, feline and murine mammals. Preferably, the subject is human.

[0318] The term, a “substantially purified” cell refers to a cell that is essentially free of other cell types. A substantially purified cell also refers to a cell which has been separated from other cell types with which it is normally associated in its naturally occurring state. In some instances, a population of substantially purified cells refers to a homogenous population of cells. In other instances, this term refers simply to cell that have been separated from the cells with which they are naturally associated in their natural state. In some aspects, the cells are cultured in vitro. In other aspects, the cells are not cultured in vitro.

[0319] The term “suicide gene” as used herein refers to a suicide or apoptosis-inducing gene operably linked to a promoter, which may be constitutive or inducible. Examples of a suicide gene include, but are not limited to, a herpes simplex virus thymidine kinase (HSV-TK), the cytoplasmic domain of Fas, a caspase such as caspase-8 or caspase-9, cytosine deaminase, E1A, FHIT, and other known suicide or apoptosis-inducing genes.

[0320] The term “suicide gene product” or “suicide domain” as used herein refers to the expression product of the suicide gene.

[0321] The term “therapeutic” as used herein means a treatment. A therapeutic effect is obtained by reduction, suppression, remission, or eradication of a disease state.

[0322] The term “tolerance” or “immune tolerance” as used herein refers to a state in which a subject has a reduced or absent immune response to a specific antigen or group of antigens to which the subject is normally responsive to. Tolerance is achieved under conditions that suppress the immune reaction and is not just the absence of an immune response. In an embodiment, tolerance in a subject can be characterized by one or more of the following: a decreased level of a specific immunological response (e.g., mediated by antigen-specific effector T lymphocytes, B lymphocytes, or antibody); a delay in the onset or progression of a specific immunological response; or a reduced risk of the onset or progression of a specific immunological response, as compared to untreated subjects.

[0323] The term “prophylaxis” as used herein means the prevention of or protective treatment for a disease or disease state.

[0324] The term “transfected” or “transformed” or “transduced” refers to a process by which exogenous nucleic acid is transferred or introduced into the host cell. A “transfected” or “transformed” or “transduced” cell is one which has been transfected, transformed or transduced with exogenous nucleic acid. The cell includes the primary subject cell and its progeny.

[0325] The term “specifically binds,” refers to an antibody, or a ligand, which recognizes and binds with a cognate binding partner (e.g., a stimulatory and/or costimulatory molecule present on a T cell) protein present in a sample, but which antibody or ligand, does not substantially recognize or bind other molecules in the sample.

[0326] “Refractory” as used herein refers to a disease, e.g., cancer, that does not respond to a treatment. In embodiments, a refractory cancer can be resistant to a treatment before or at the beginning of the treatment. In other embodiments, the refractory cancer can become resistant during a treatment. A refractory cancer is also called a resistant cancer.

[0327] “Relapsed” or “relapse” as used herein refers to the return or reappearance of a disease (e.g., cancer) or the signs and symptoms of a disease such as cancer after a period of improvement or responsiveness, e.g., after prior treatment of a therapy, e.g., cancer therapy. The initial period of responsiveness may involve the level of cancer cells falling below a certain threshold, e.g., below 20%, 1%, 10%, 5%, 4%, 3%, 2%, or 1%. The reappearance may involve the level of cancer cells rising above a certain threshold, e.g., above 20%, 1%, 10%, 5%, 4%, 3%, 2%, or 1%. For example, e.g., in the context of B-ALL, the reappearance may involve, e.g., a reappearance of blasts in the blood, bone marrow (>5%), or any extramedullary site, after a complete response. A complete response, in this context, may involve <5% BM blast. More generally, in an embodiment, a response (e.g., complete response or partial response) can involve the absence of detectable MRD (minimal residual disease). In an embodiment, the initial period of responsiveness lasts at least 1, 2, 3, 4, 5, or 6 days; at least 1, 2, 3, or 4 weeks; at least 1, 2, 3, 4, 6, 8, 10, or 12 months; or at least 1, 2, 3, 4, or 5 years.

[0328] Ranges: throughout this disclosure, various aspects of the invention can be presented in a range format. It should be understood that the description in range format is merely for convenience and brevity and should not be construed as an inflexible limitation on the scope of the invention. Accordingly, the description of a range should be considered to have specifically disclosed all the possible subranges as well as individual numerical values within that range. For example, description of a range such as from 1 to 6 should be considered to have specifically disclosed subranges such as from 1 to 3, from 1 to 4, from 1 to 5, from 2 to 4, from 2 to 6, from 3 to 6 etc., as well as individual numbers within that range, for example, 1, 2, 2.7, 3, 4, 5, 5.3, and 6. As another example, a range such as 95-99% identity, includes something with 95%, 96%, 97%, 98% or 99% identity, and includes subranges such as 96-99%, 96-98%, 96-97%, 97-99%, 97-98% and 98-99% identity. This applies regardless of the breadth of the range.

[0329] Fusion Proteins

[0330] Provided herein are fusion proteins including two protein domains separated by a heterologous protease cleavage site (e.g., a protease cleave site that is cleaved by a mammalian intracellular or extracellular protease), wherein a first of the protein domains is a conditional expression domain, e.g., a degradation domain or an aggregation domain. In some embodiments, the fusion proteins described herein comprise three essential elements: a conditional expression domain, e.g., a degradation domain or an aggregation domain, a domain containing the protein of interest, and a protease cleavage domain separating the two. These elements can be arranged such that the conditional expression domain, e.g., a degradation domain or an aggregation domain, is located either N-terminal or C-terminal to the protein of interest.

[0331] In some embodiments, the fusion protein described herein includes a furin cleavage site. In some embodiments, the fusion proteins described herein include any one of furin cleavage sites listed in Table 20. In some embodiments, the fusion proteins described herein include a furin cleavage site selected from RTKR (SEQ ID NO: 123); GTGAEDPRPSRKRRSLGDVG (SEQ ID NO: 125) or a sequence having at least 90%, 95%, 97%, 98%, or 99% identity thereto; GTGAEDPRPSRKRR (SEQ ID NO: 127) or a sequence having at least 90%, 95%, 97%, 98%, or 99% identity thereto; LQWLEQQVAKRRTKR (SEQ ID NO: 129) or a sequence having at least 90%, 95%, 97%, 98%, or 99% identity thereto; GTGAEDPRPSRKRRSLGG (SEQ ID NO: 131) or a sequence having at least 90%, 95%, 97%, 98%, or 99% identity thereto; GTGAEDPRPSRKRRSLG (SEQ ID NO: 133) or a sequence having at least 90%, 95%, 97%, 98%, or 99% identity thereto; SLNLTESHNSRKKR (SEQ ID NO: 135) or a sequence having at least 90%, 95%, 97%, 98%, or 99% identity thereto; or CKINGYPKRGRKRR (SEQ ID NO: 137) or a sequence having at least 90%, 95%, 97%, 98%, or 99% identity thereto. In some embodiments, the fusion proteins described herein include a furin cleavage site selected from GTGAEDPRPSRKRRSLGDVG (SEQ ID NO: 125) or a sequence having at least 90%, 95%, 97%, 98%, or 99% identity thereto, or GTGAEDPRPSRKRR (SEQ ID NO: 127) or a sequence having at least 90%, 95%, 97%, 98%, or 99% identity thereto. In some embodiments, the fusion proteins described herein include the furin cleavage site of GTGAEDPRPSRKRRSLGDVG (SEQ ID NO: 125) or a sequence having at least 90%, 95%, 97%, 98%, or 99% identity thereto.

[0332] In some embodiments, the fusion proteins described herein include a furin cleavage site selected from RTKR (SEQ ID NO: 123); GTGAEDPRPSRKRRSLGDVG (SEQ ID NO: 125); GTGAEDPRPSRKRR (SEQ ID NO: 127); LQWLEQQVAKRRTKR (SEQ ID NO: 129); GTGAEDPRPSRKRRSLGG (SEQ ID NO: 131); GTGAEDPRPSRKRRSLG (SEQ ID NO: 133); SLNLTESHNSRKKR (SEQ ID NO: 135); or CKINGYPKRGRKRR (SEQ ID NO: 137). In some embodiments, the fusion proteins described herein include a furin cleavage site selected from GTGAEDPRPSRKRRSLGDVG (SEQ ID NO: 125) or GTGAEDPRPSRKRR (SEQ ID NO: 127). In some embodiments, the fusion proteins described herein include the furin cleavage site of GTGAEDPRPSRKRRSLGDVG (SEQ ID NO: 125).

[0333] In some embodiments, the fusion protein described herein includes a furin degron (FurON) domain, which comprises two components: a degron or degradation domain, which is a mutated protein domain unable to acquire a proper conformation in the absence of a small molecule ligand, and a furin cleavage site. The furin degron domain can be fused to a protein of interest that is expressed in the endoplasmic reticulum. The N- and/or C-termini of the protein of interest can be used as site of fusion, provided that the furin degron domain faces the lumen of the endoplasmic reticulum. The protein of interest can be either a membrane protein (regardless of the number of transmembrane domains) or a soluble protein. The orientation of the furin cleavage site relative to the degron domain should be such that the cleavage results in the separation of the furin degron domain and protein of interest. In the absence of the small molecule ligand or stabilization compound, the furin degron domain leads to the destabilization or degradation of the entire fusion protein. In the presence of the small molecule ligand or stabilization compound, the fusion protein is spared from degradation. The furin degron domain is mutated such that the affinity to its natural endogenous ligand is abolished; the affinity to the small molecule ligand or stabilization compound is preserved; and protein instability is conferred when the small molecule is absent.

[0334] In some embodiments, the degron or degradation domain is derived from a protein listed in Table 21. In some embodiments, the degron or degradation domain is derived from an estrogen receptor. In some embodiments, the degron or degradation domain comprises an amino acid sequence selected from SEQ ID NO: 58 or a sequence having at least 90%, 95%, 97%, 98%, or 99% identity thereto, or SEQ ID NO: 121 or a sequence having at least 90%, 95%, 97%, 98%, or 99% identity thereto. In some embodiments, the degron or degradation domain comprises an amino acid sequence selected from SEQ ID NO: 58 or SEQ ID NO: 121.

[0335] In some embodiments, the degron or degradation domain is derived from an FKB protein (FKBP). In some embodiments, the degradation domain comprises an amino acid sequence of SEQ ID NO: 56 or a sequence having at least 90%, 95%, 97%, 98%, or 99% identity thereto. In some embodiments, the degradation domain comprises an amino acid sequence of SEQ ID NO: 56.

[0336] In some embodiments, the degron or degradation domain is derived from dihydrofolate reductase (DHFR). In some embodiments, the degradation domain comprises an amino acid sequence selected from SEQ ID NO: 57 or a sequence having at least 90%, 95%, 97%, 98%, or 99% identity thereto. In some embodiments, the degradation domain comprises an amino acid sequence selected from SEQ ID NO: 57. In some embodiments, the degron or degradation domain is not derived from an FKB protein, estrogen receptor, or DHFR.

[0337] Proteins of Interest

[0338] The fusion proteins of the invention can include virtually any protein of interest. In certain preferred embodiments, the protein of interest can be a transmembrane protein (e.g., a transmembrane receptor). The format of the fusion proteins of the invention are of particular use in such transmembrane proteins because inclusion of an intact conditional expression domain, e.g., degradation domain or, e.g., aggregation domain, on the N-terminus of a transmembrane receptor would possibly result in disruption of the activity of the protein of interest, while inclusion on the C-terminus may result in poor regulation of the protein of interest (because, e.g., integration into the membrane may result in sufficient stabilization of the protein or degradation domain to avoid degradation and/or aggreggation). One example of a class of proteins of interest is Chimeric Antigen T Cell Receptors as described in the section below.

[0339] Chimeric Antigen Receptor

[0340] In some embodiments, the protein of interest is a chimeric antigen receptor (CAR), wherein the CAR comprises an antigen binding domain (e.g., antibody or antibody fragment, TCR or TCR fragment) that binds to a tumor antigen as described herein, a transmembrane domain (e.g., a transmembrane domain described herein), and an intracellular signaling domain (e.g., an intracellular signaling domain described herein) (e.g., an intracellular signaling domain comprising a costimulatory domain (e.g., a costimulatory domain described herein) and/or a primary signaling domain (e.g., a primary signaling domain described herein). CAR nucleic acid constructs, encoded proteins, containing vectors, host cells, pharmaceutical compositions, and methods of administration and treatment related to the present disclosure are disclosed in detail in International Patent Application Publication No. WO2015142675, which is incorporated by reference in its entirety.

[0341] In some embodiments, the protein of interest is a chimeric antigen receptor (CAR), wherein the CAR comprises an antigen binding domain (e.g., antibody or antibody fragment, TCR or TCR fragment) that binds to a tumor-supporting antigen (e.g., a tumor-supporting antigen as described herein), a transmembrane domain (e.g., a transmembrane domain described herein), and an intracellular signaling domain (e.g., an intracellular signaling domain described herein) (e.g., an intracellular signaling domain comprising a costimulatory domain (e.g., a costimulatory domain described herein) and/or a primary signaling domain (e.g., a primary signaling domain described herein). In some embodiments, the tumor-supporting antigen is an antigen present on a stromal cell or a myeloid-derived suppressor cell (MDSC). In other aspects, the invention features polypeptides encoded by such nucleic acids and host cells containing such nucleic acids and/or polypeptides.

[0342] In some embodiments, a CAR molecule comprises at least one intracellular signaling domain selected from a CD137 (4-1BB) signaling domain, a CD28 signaling domain, a CD27 signaling domain, an ICOS signaling domain, a CD3zeta signal domain, or any combination thereof. In some embodiments, a CAR molecule comprises at least one intracellular signaling domain selected from one or more costimulatory molecule(s) selected from CD137 (4-1BB), CD28, CD27, or ICOS.

[0343] The present invention, in some aspects, also includes a method of modifying a T cell with a chimeric antigen receptor (CAR) and a suicide gene. Thus, the present invention encompasses a nucleic acid encoding a CAR or a modified T cell comprising a CAR, wherein the CAR includes an antigen binding domain, a transmembrane domain and an intracellular domain.

[0344] Example of CARs are described in U.S. Pat. Nos. 8,911,993, 8,906,682, 8,975,071, 8,916,381, 9,102,760, 9,101,584, and 9,102,761, all of which are incorporated herein by reference in their entireties.

[0345] Sequences of non-limiting examples of various components that can be part of a CAR molecule are listed in Table 2, where “aa” stands for amino acids, and “no” stands for nucleic acids that encode the corresponding peptide.

TABLE 2
Sequences of various components of CAR (aa - amino acids, na - nucleic acids that
encodes the corresponding protein)

| SEQ | | |
|---|---|---|
| ID | | |
| NO | description | Sequence |
| 1 | EF-1 | CGTGAGGCTCCGGTGCCCGTCAGTGGGCAGAGCGCACATC |
| | promoter | GCCCACAGTCCCCGAGAAGTTGGGGGGAGGGGTCGGCAAT |
| | | TGAACCGGTGCCTAGAGAAGGTGGCGCGGGGTAAACTGGG |
| | | AAAGTGATGTCGTGTACTGGCTCCGCCTTTTTCCCGAGGGT |
| | | GGGGGAGAACCGTATATAAGTGCAGTAGTCGCCGTGAACGT |
| | | TCTTTTTCGCAACGGGTTTGCCGCCAGAACACAGGTAAGTG |
| | | CCGTGTGTGGTTCCCGCGGGCCTGGCCTCTTTACGGGTTAT |
| | | GGCCCTTGCGTGCCTTGAATTACTTCCACCTGGCTGCAGTA |
| | | CGTGATTCTTGATCCCGAGCTTCGGGTTGGAAGTGGGTGGG |
| | | AGAGTTCGAGGCCTTGCGCTTAAGGAGCCCCTTCGCCTCGT |
| | | GCTTGAGTTGAGGCCTGGCCTGGGCGCTGGGGCCGCCGCG |
| | | TGCGAATCTGGTGGCACCTTCGCGCCTGTCTCGCTGCTTTC |
| | | GATAAGTCTCTAGCCATTTAAAATTTTTGATGACCTGCTGCG |
| | | ACGCTTTTTTTCTGGCAAGATAGTCTTGTAAATGCGGGCCAA |
| | | GATCTGCACACTGGTATTTCGGTTTTTGGGGCCGCGGGCGG |
| | | CGACGGGGCCCGTGCGTCCCAGCGCACATGTTCGGCGAGG |
| | | CGGGGCCTGCGAGCGCGGCCACCGAGAATCGGACGGGGG |
| | | TAGTCTCAAGCTGGCCGGCCTGCTCTGGTGCCTGGCCTCGC |
| | | GCCGCCGTGTATCGCCCCGCCCTGGGCGGCAAGGCTGGCC |
| | | CGGTCGGCACCAGTTGCGTGAGCGGAAAGATGGCCGCTTC |
| | | CCGGCCCTGCTGCAGGGAGCTCAAAATGGAGGACGCGGCG |
| | | CTCGGGAGAGCGGGCGGGTGAGTCACCCACACAAAGGAAA |
| | | AGGGCCTTTCCGTCCTCAGCCGTCGCTTCATGTGACTCCAC |
| | | GGAGTACCGGGCGCCGTCCAGGCACCTCGATTAGTTCTCGA |
| | | GCTTTTGGAGTACGTCGTCTTTAGGTTGGGGGGAGGGGTTT |
| | | TATGCGATGGAGTTTCCCCACACTGAGTGGGTGGAGACTGA |
| | | AGTTAGGCCAGCTTGGCACTTGATGTAATTCTCCTTGGAATT |
| | | TGCCCTTTTTGAGTTTGGATCTTGGTTCATTCTCAAGCCTCA |
| | | GACAGTGGTTCAAAGTTTTTTTCTTCCATTTCAGGTGTCGTGA |
| 2 | Leader (aa) | MALPVTALLLPLALLLHAARP |
| 3 | Leader (na) | ATGGCCCTGCCTGTGACAGCCCTGCTGCTGCCTCTGGCTCT |
| | | GCTGCTGCATGCCGCTAGACCC |
| 33 | Leader (na) | ATGGCCCTCCCTGTCACCGCCCTGCTGCTTCCGCTGGCTCT |
| | | TCTGCTCCACGCCGCTCGGCCC |
| 4 | CD8 hinge | TTTPAPRPPTPAPTIASQPLSLRPEACRPAAGGAVHTRGLDFA |
| | (aa) | CD |
| 5 | CD8 hinge | ACCACGACGCCAGCGCCGCGACCACCAACACCGGCGCCCA |
| | (na) | CCATCGCGTCGCAGCCCCTGTCCCTGCGCCCAGAGGCGTG |
| | | CCGGCCAGCGGCGGGGGGCGCAGTGCACACGAGGGGGCT |
| | | GGACTTCGCCTGTGAT |
| 6 | Ig4 hinge | ESKYGPPCPPCPAPEFLGGPSVFLFPPKPKDTLMISRTPEVTCV |
| | (aa) | VVDVSQEDPEVQFNWYVDGVEVHNAKTKPREEQFNSTYRVVS |
| | | VLTVLHQDWLNGKEYKCKVSNKGLPSSIEKTISKAKGQPREPQ |
| | | VYTLPPSQEEMTKNQVSLTCLVKGFYPSDIAVEWESNGQPENN |
| | | YKTTPPVLDSDGSFFLYSRLTVDKSRWQEGNVFSCSVMHEAL |
| | | HNHYTQKSLSLSLGKM |
| 7 | Ig4 hinge | GAGAGCAAGTACGGCCCTCCCTGCCCCCCTTGCCCTGCCC |
| | (na) | CCGAGTTCCTGGGCGGACCCAGCGTGTTCCTGTTCCCCCCC |
| | | AAGCCCAAGGACACCCTGATGATCAGCCGGACCCCCGAGG |
| | | TGACCTGTGTGGTGGTGGACGTGTCCCAGGAGGACCCCGA |
| | | GGTCCAGTTCAACTGGTACGTGGACGGCGTGGAGGTGCAC |
| | | AACGCCAAGACCAAGCCCCGGGAGGAGCAGTTCAATAGCA |
| | | CCTACCGGGTGGTGTCCGTGCTGACCGTGCTGCACCAGGA |
| | | CTGGCTGAACGGCAAGGAATACAAGTGTAAGGTGTCCAACA |
| | | AGGGCCTGCCCAGCAGCATCGAGAAAACCATCAGCAAGGC |
| | | CAAGGGCCAGCCTCGGGAGCCCCAGGTGTACACCCTGCCC |
| | | CCTAGCCAAGAGGAGATGACCAAGAACCAGGTGTCCCTGAC |
| | | CTGCCTGGTGAAGGGCTTCTACCCCAGCGACATCGCCGTG |
| | | GAGTGGGAGAGCAACGGCCAGCCCGAGAACAACTACAAGA |
| | | CCACCCCCCCTGTGCTGGACAGCGACGGCAGCTTCTTCCTG |
| | | TACAGCCGGCTGACCGTGGACAAGAGCCGGTGGCAGGAGG |
| | | GCAACGTCTTTAGCTGCTCCGTGATGCACGAGGCCCTGCAC |
| | | AACCACTACACCCAGAAGAGCCTGAGCCTGTCCCTGGGCAA |
| | | GATG |
| 8 | IgD hinge | RWPESPKAQASSVPTAQPQAEGSLAKATTAPATTRNTGRGGE |
| | (aa) | EKKKEKEKEEQEERETKTPECPSHTQPLGVYLLTPAVQDLWLR |
| | | DKATFTCFVVGSDLKDAHLTWEVAGKVPTGGVEEGLLERHSN |
| | | GSQSQHSRLTLPRSLWNAGTSVTCTLNHPSLPPQRLMALREP |
| | | AAQAPVKLSLNLLASSDPPEAASWLLCEVSGFSPPNILLMWLE |
| | | DQREVNTSGFAPARPPPQPGSTTFWAWSVLRVPAPPSPQPAT |
| | | YTCVVSHEDSRTLLNASRSLEVSYVTDH |
| 9 | IgD hinge | AGGTGGCCCGAAAGTCCCAAGGCCCAGGCATCTAGTGTTCC |
| | (na) | TACTGCACAGCCCCAGGCAGAAGGCAGCCTAGCCAAAGCTA |
| | | CTACTGCACCTGCCACTACGCGCAATACTGGCCGTGGCGG |
| | | GGAGGAGAAGAAAAAGGAGAAAGAGAAAGAAGAACAGGAA |
| | | GAGAGGGAGACCAAGACCCCTGAATGTCCATCCCATACCCA |
| | | GCCGCTGGGCGTCTATCTCTTGACTCCCGCAGTACAGGACT |
| | | TGTGGCTTAGAGATAAGGCCACCTTTACATGTTTCGTCGTGG |
| | | GCTCTGACCTGAAGGATGCCCATTTGACTTGGGAGGTTGCC |
| | | GGAAAGGTACCCACAGGGGGGGTTGAGGAAGGGTTGCTGG |
| | | AGCGCCATTCCAATGGCTCTCAGAGCCAGCACTCAAGACTC |
| | | ACCCTTCCGAGATCCCTGTGGAACGCCGGGACCTCTGTCAC |
| | | ATGTACTCTAAATCATCCTAGCCTGCCCCCACAGCGTCTGAT |
| | | GGCCCTTAGAGAGCCAGCCGCCCAGGCACCAGTTAAGCTTA |
| | | GCCTGAATCTGCTCGCCAGTAGTGATCCCCCAGAGGCCGCC |
| | | AGCTGGCTCTTATGCGAAGTGTCCGGCTTTAGCCCGCCCAA |
| | | CATCTTGCTCATGTGGCTGGAGGACCAGCGAGAAGTGAACA |
| | | CCAGCGGCTTCGCTCCAGCCCGGCCCCCACCCCAGCCGGG |
| | | TTCTACCACATTCTGGGCCTGGAGTGTCTTAAGGGTCCCAG |
| | | CACCACCTAGCCCCCAGCCAGCCACATACACCTGTGTTGTG |
| | | TCCCATGAAGATAGCAGGACCCTGCTAAATGCTTCTAGGAG |
| | | TCTGGAGGTTTCCTACGTGACTGACCATT |
| 10 | GS | GGGGSGGGGS |
| | hinge/linker | |
| | (aa) | |
| 11 | GS | GGTGGCGGAGGTTCTGGAGGTGGAGGTTCC |
| | hinge/linker | |
| | (na) | |
| 12 | CD8TM (aa) | IYIWAPLAGTCGVLLLSLVITLYC |
| 13 | CD8 TM | ATCTACATCTGGGCGCCCTTGGCCGGGACTTGTGGGGTCCT |
| | (na) | TCTCCTGTCACTGGTTATCACCCTTTACTGC |
| 34 | CD8 TM | ATCTACATTTGGGCCCCTCTGGCTGGTACTTGCGGGGTCCT |
| | (na) | GCTGCTTTCACTCGTGATCACTCTTTACTGT |
| 14 | 4-1 BB | KRGRKKLLYIFKQPFMRPVQTTQEEDGCSCRFPEEEEGGCEL |
| | intracellular | |
| | domain (aa) | |
| 15 | 4-1BB | AAACGGGGCAGAAAGAAACTCCTGTATATATTCAAACAACCA |
| | intracellular | TTTATGAGACCAGTACAAACTACTCAAGAGGAAGATGGCTGT |
| | domain (na) | AGCTGCCGATTTCCAGAAGAAGAAGAAGGAGGATGTGAACTG |
| 118 | 4-1BB | AAGCGCGGTCGGAAGAAGCTGCTGTACATCTTTAAGCAACC |
| | intracellular | CTTCATGAGGCCTGTGCAGACTACTCAAGAGGAGGACGGCT |
| | domain (na) | GTTCATGCCGGTTCCCAGAGGAGGAGGAAGGCGGCTGCGA |
| | | ACTG |
| 16 | CD27 (aa) | QRRKYRSNKGESPVEPAEPCRYSCPREEEGSTIPIQEDYRKPE |
| | | PACSP |
| 17 | CD27 (na) | AGGAGTAAGAGGAGCAGGCTCCTGCACAGTGACTACATGAA |
| | | CATGACTCCCCGCCGCCCCGGGCCCACCCGCAAGCATTAC |
| | | CAGCCCTATGCCCCACCACGCGACTTCGCAGCCTATCGCTCC |
| 18 | CD3-zeta | RVKFSRSADAPAYKQGQNQLYNELNLGRREEYDVLDKRRGRD |
| | (aa) | PEMGGKPRRKNPQEGLYNELQKDKMAEAYSEIGMKGERRRG |
| | | KGHDGLYQGLSTATKDTYDALHMQALPPR |
| 19 | CD3-zeta | AGAGTGAAGTTCAGCAGGAGCGCAGACGCCCCCGCGTACA |
| | (na) | AGCAGGGCCAGAACCAGCTCTATAACGAGCTCAATCTAGGA |
| | | CGAAGAGAGGAGTACGATGTTTTGGACAAGAGACGTGGCCG |
| | | GGACCCTGAGATGGGGGGAAAGCCGAGAAGGAAGAACCCT |
| | | CAGGAAGGCCTGTACAATGAACTGCAGAAAGATAAGATGGC |
| | | GGAGGCCTACAGTGAGATTGGGATGAAAGGCGAGCGCCGG |
| | | AGGGGCAAGGGGCACGATGGCCTTTACCAGGGTCTCAGTA |
| | | CAGCCACCAAGGACACCTACGACGCCCTTCACATGCAGGCC |
| | | CTGCCCCCTCGC |
| 119 | CD3-zeta | CGCGTGAAATTCAGCCGCAGCGCAGATGCTCCAGCCTACAA |
| | (na) | GCAGGGGCAGAACCAGCTCTACAACGAACTCAATCTTGGTC |
| | | GGAGAGAGGAGTACGACGTGCTGGACAAGCGGAGAGGACG |
| | | GGACCCAGAAATGGGCGGGAAGCCGCGCAGAAAGAATCCC |
| | | CAAGAGGGCCTGTACAACGAGCTCCAAAAGGATAAGATGGC |
| | | AGAAGCCTATAGCGAGATTGGTATGAAAGGGGAACGCAGAA |
| | | GAGGCAAAGGCCACGACGGACTGTACCAGGGACTCAGCAC |
| | | CGCCACCAAGGACACCTATGACGCTCTTCACATGCAGGCCC |
| | | TGCCGCCTCGG |
| 20 | CD3-zeta | RVKFSRSADAPAYQQGQNQLYNELNLGRREEYDVLDKRRGRD |
| | (aa) | PEMGGKPRRKNPQEGLYNELQKDKMAEAYSEIGMKGERRRG |
| | | KGHDGLYQGLSTATKDTYDALHMQALPPR |
| 21 | CD3-zeta | AGAGTGAAGTTCAGCAGGAGCGCAGACGCCCCCGCGTACC |
| | (na) | AGCAGGGCCAGAACCAGCTCTATAACGAGCTCAATCTAGGA |
| | | CGAAGAGAGGAGTACGATGTTTTGGACAAGAGACGTGGCCG |
| | | GGACCCTGAGATGGGGGGAAAGCCGAGAAGGAAGAACCCT |
| | | CAGGAAGGCCTGTACAATGAACTGCAGAAAGATAAGATGGC |
| | | GGAGGCCTACAGTGAGATTGGGATGAAAGGCGAGCGCCGG |
| | | AGGGGCAAGGGGCACGATGGCCTTTACCAGGGTCTCAGTA |
| | | CAGCCACCAAGGACACCTACGACGCCCTTCACATGCAGGCC |
| | | CTGCCCCCTCGC |
| 22 | linker | GGGGS |
| 23 | linker | GGTGGCGGAGGTTCTGGAGGTGGAGGTTCC |
| 24 | PD-1 | Pgwfldspdrpwnpptfspallyytegdnatftcsfsntsesfylnwyrmspsnqtdklaa |
| | extracellular | fpedrsqpgqdcrfrvtqlpngrdfhmsvvrarrndsgtylcgaislapkaqikeslraelryt |
| | domain (aa) | erraevptahpspsprpagqfqtlv |
| 25 | PD-1 | Cccggatggtttctggactctccggatcgcccgtggaatcccccaaccttctcaccggca |
| | extracellular | ctcttggttgtgactgagggcgataatgcgaccttcacgtgctcgttctccaacacctccga |
| | domain (na) | atcattcgtgctgaactggtaccgcatgagcccgtcaaaccagaccgacaagctcgccg |
| | | cgtttccggaagatcggtcgcaaccgggacaggattgtcggttccgcgtgactcaactgc |
| | | cgaatggcagagacttccacatgagcgtggtccgcgctaggcgaaacgactccggga |
| | | cctacctgtgcggagccatctcgctggcgcctaaggcccaaatcaaagagagcttgagg |
| | | gccgaactgagagtgaccgagcgcagagctgaggtgccaactgcacatccatccccat |
| | | cgcctcggcctgcggggcagtttcagaccctggtc |
| 26 | PD-1 CAR | Malpvtalllplalllhaarppgwfldspdrpwnpptfspallyvtegdnatftcsfsntsesfv |
| | (aa) with | lnwyrmspsnqtdklaafpedrsqpgqdcrfrvtqlpngrdfhmsvvrarrndsgtylcg |
| | signal | aislapkaqikeslraelryterraevptahpspsprpagqfqtlvtttpaprpptpaptiasq |
| | | plslrpeacrpaaggavhtrgldfacdiyiwaplagtcgvlllslvitlyckrgrkkllyifkgpfm |
| | | rpvqttqeedgcscrfpeeeeggcelrvkfsrsadapaykqgqnglynelnlgrreeydvl |
| | | dkrrgrdpemggkprrknpqeglynelqkdkmaeayseigmkgerrrgkghdglyggl |
| | | statkdtydalhmqalppr |
| 27 | PD-1 CAR | Atggccctccctgtcactgccctgcttctccccctcgcactcctgctccacgccgctagacc |
| | (na) | acccggatggtttctggactctccggatcgcccgtggaatcccccaaccttctcaccggca |
| | | ctcttggttgtgactgagggcgataatgcgaccttcacgtgctcgttctccaacacctccga |
| | | atcattcgtgctgaactggtaccgcatgagcccgtcaaaccagaccgacaagctcgccg |
| | | cgtttccggaagatcggtcgcaaccgggacaggattgtcggttccgcgtgactcaactgc |
| | | cgaatggcagagacttccacatgagcgtggtccgcgctaggcgaaacgactccggga |
| | | cctacctgtgcggagccatctcgctggcgcctaaggcccaaatcaaagagagcttgagg |
| | | gccgaactgagagtgaccgagcgcagagctgaggtgccaactgcacatccatccccat |
| | | cgcctcggcctgcggggcagtttcagaccctggtcacgaccactccggcgccgcgccc |
| | | accgactccggccccaactatcgcgagccagcccctgtcgctgaggccggaagcatgc |
| | | cgccctgccgccggaggtgctgtgcatacccggggattggacttcgcatgcgacatctac |
| | | atttgggctcctctcgccggaacttgtggcgtgctccttctgtccctggtcatcaccctgtactg |
| | | caagcggggtcggaaaaagcttctgtacattttcaagcagcccttcatgaggcccgtgca |
| | | aaccacccaggaggaggacggttgctcctgccggttccccgaagaggaagaaggag |
| | | gttgcgagctgcgcgtgaagttctcccggagcgccgacgcccccgcctataagcaggg |
| | | ccagaaccagctgtacaacgaactgaacctgggacggcgggaagagtacgatgtgct |
| | | ggacaagcggcgcggccgggaccccgaaatgggcgggaagcctagaagaaagaa |
| | | ccctcaggaaggcctgtataacgagctgcagaaggacaagatggccgaggcctactc |
| | | cgaaattgggatgaagggagagcggcggaggggaaaggggcacgacggcctgtac |
| | | caaggactgtccaccgccaccaaggacacatacgatgccctgcacatgcaggcccttc |
| | | cccctcgc |
| 28 | linker | (Gly-Gly-Gly-Ser)n, where n = 1-10 |
| 29 | linker | (Gly4 Ser)4 |
| 30 | linker | (Gly4 Ser)3 |
| 31 | linker | (Gly3Ser) |
| 32 | polyA | [a]₅₀₋₅₀₀₀ |
| 39 | PD1 CAR | Pqwfldspdrpwnpptfspallvvtegdnatftcsfsntsesfylnwyrmspsnqtdklaa |
| | (aa) | fpedrsqpqqdcrfrvtqlpnqrdfhmsvvrarrndsqtylcgaislapkaqikeslraelrvt |
| | | erraevptahpspsprpagqfqtlvtttpaprpptpaptiasqplslrpeacrpaaggavht |
| | | rgldfacdiyiwaplagtcgvlllslvitlyckrgrkkllyifkqpfmrpvqttqeedgcscrfpee |
| | | eeggcelrvkfsrsadapaykqgqnqlynelnlgrreeydvldkrrgrdpemggkprrkn |
| | | pqeglynelqkdkmaeayseigmkgerrrgkghdglyqglstatkdtydalhmqalppr |
| 120 | ICOS | TKKKYSSSVHDPNGEYMFMRAVNTAKKSRLTDVTL |
| | intracellular | |
| | domain (aa) | |
| 1111 | ICOS | ACAAAAAAGAAGTATTCATCCAGTGTGCACGACCCTAACGGT |
| | intracellular | GAATACATGTTCATGAGAGCAGTGAACACAGCCAAAAAATCC |
| | domain (na) | AGACTCACAGATGTGACCCTA |
| 972 | ICOS TM | TTTPAPRPPTPAPTIASQPLSLRPEACRPAAGGAVHTRGLDFA |
| | domain (aa) | CDFWLPIGCAAFVVVCILGCILICWL |
| 973 | ICOS TM | ACCACGACGCCAGCGCCGCGACCACCAACACCGGCGCCCA |
| | domain (na) | CCATCGCGTCGCAGCCCCTGTCCCTGCGCCCAGAGGCGTG |
| | | CCGGCCAGCGGCGGGGGGCGCAGTGCACACGAGGGGGCT |
| | | GGACTTCGCCTGTGATTTCTGGTTACCCATAGGATGTGCAG |
| | | CCTTTGTTGTAGTCTGCATTTTGGGATGCATACTTATTTGTTG |
| | | GCTT |
| 124 | CD28 | RSKRSRLLHSDYMNMTPRRPGPTRKHYQPYAPPRDFAAYRS |
| | intracellular | |
| | domain (aa) | |
| 1113 | CD28 | AGGAGTAAGAGGAGCAGGCTCCTGCACAGTGACTACATGAA |
| | intracellular | CATGACTCCCCGCCGCCCCGGGCCCACCCGCAAGCATTAC |
| | domain (na) | CAGCCCTATGCCCCACCACGCGACTTCGCAGCCTATCGCTCC |

[0346] In specific aspects, a CAR construct comprises a scFv domain, wherein the scFv may be preceded by an optional leader sequence such as provided in SEQ ID NO: 2, and followed by an optional hinge sequence such as provided in SEQ ID NO:4 or SEQ ID NO:6 or SEQ ID NO:8 or SEQ ID NO:10, a transmembrane region such as provided in SEQ ID NO:12, an intracellular signalling domain that includes any one of SEQ ID NO:14, SEQ ID NO:16, SEQ ID NO: 120, or SEQ ID NO: 124, and a CD3 zeta sequence that includes SEQ ID NO: 18 or SEQ ID NO: 20, e.g., wherein the domains are contiguous with and in the same reading frame to form a single fusion protein.

[0347] In one aspect, an exemplary CAR constructs comprise an optional leader sequence (e.g., a leader sequence described herein), an extracellular antigen binding domain (e.g., an antigen binding domain described herein), a hinge (e.g., a hinge region described herein), a transmembrane domain (e.g., a transmembrane domain described herein), and an intracellular stimulatory domain (e.g., an intracellular stimulatory domain described herein). In one aspect, an exemplary CAR construct comprises an optional leader sequence (e.g., a leader sequence described herein), an extracellular antigen binding domain (e.g., an antigen binding domain described herein), a hinge (e.g., a hinge region described herein), a transmembrane domain (e.g., a transmembrane domain described herein), an intracellular costimulatory signaling domain (e.g., a costimulatory signaling domain described herein) and/or an intracellular primary signaling domain (e.g., a primary signaling domain described herein).

[0348] An exemplary leader sequence is provided as SEQ ID NO: 2. An exemplary hinge/spacer sequence is provided as SEQ ID NO: 4 or SEQ ID NO: 6 or SEQ ID NO: 8 or SEQ ID NO: 10. An exemplary transmembrane domain sequence is provided as SEQ ID NO: 12. An exemplary sequence of the intracellular signaling domain of the 4-1BB protein is provided as SEQ ID NO: 14. An exemplary sequence of the intracellular signaling domain of CD27 is provided as SEQ ID NO: 16. An exemplary sequence of the intracellular signaling domain of ICOS is provided as SEQ ID NO: 120. An exemplary sequence of the intracellular signaling domain of CD28 is provided as SEQ ID NO: 124. An exemplary CD3zeta domain sequence is provided as SEQ ID NO: 18 or SEQ ID NO: 20.

[0349] The nucleic acid sequences coding for the desired molecules can be obtained using recombinant methods known in the art, such as, for example by screening libraries from cells expressing the nucleic acid molecule, by deriving the nucleic acid molecule from a vector known to include the same, or by isolating directly from cells and tissues containing the same, using standard techniques. Alternatively, the nucleic acid of interest can be produced synthetically, rather than cloned.

[0350] Antigen Binding Domain

[0351] In one aspect, a chimeric antigen receptor (CAR) comprises a target-specific binding element otherwise referred to as an antigen binding domain. The choice of moiety depends upon the type and number of ligands that define the surface of a target cell. For example, the antigen binding domain may be chosen or engineered to recognize a ligand that acts as a cell surface marker on target cells associated with a particular disease state, e.g., a tumor antigen associated with a particular cancer (e.g., an antigen binding domain that binds to a tumor antigen). In other embodiments, the antigen binding domain is chosen or engineered to recognize normal B cells, or a subpopulation of B cells, for depleting normal B cells or a target B cell population (e.g., an antigen binding domain that binds to a B cell antigen).

[0352] The antigen binding domain can be any domain that binds to the antigen including but not limited to a monoclonal antibody, a polyclonal antibody, a recombinant antibody, a bispecific antibody, a conjugated antibody, a human antibody, a humanized antibody, and a functional fragment thereof, including but not limited to a single-domain antibody such as a heavy chain variable domain (VH), a light chain variable domain (VL) and a variable domain (VHH) of camelid derived nanobody, and to an alternative scaffold known in the art to function as antigen binding domain, such as a recombinant fibronectin domain, a T cell receptor (TCR), a recombinant TCR with enhanced affinity, or a fragment there of, e.g., single chain TCR, and the like. In some instances, it is beneficial for the antigen binding domain to be derived from the same species in which the CAR will ultimately be used in. For example, for use in humans, it may be beneficial for the antigen binding domain of the CAR to comprise human or humanized residues for the antigen binding domain of an antibody or antibody fragment.

[0353] In some embodiments, the antigen binding domain of the encoded CAR molecule comprises an antibody, an antibody fragment, an scFv, a Fv, a Fab, a (Fab′)2, a single domain antibody (SDAB), a VH or VL domain, a camelid VHH domain or a bi-functional (e.g. bi-specific) hybrid antibody (e.g., Lanzavecchia et al., Eur. J. Immunol. 17, 105 (1987)).

[0354] In some embodiments, the antigen binding domain of the encoded CAR molecule comprises an scFv. In some instances, scFvs can be prepared according to method known in the art (see, for example, Bird et al., (1988) Science 242:423-426 and Huston et al., (1988) Proc. Natl. Acad. Sci. USA 85:5879-5883). ScFv molecules can be produced by linking VH and VL regions together using flexible polypeptide linkers.

[0355] In one aspect, the antigen binding domain of the CAR is a scFv antibody fragment that is humanized compared to the murine sequence of the scFv from which it is derived.

[0356] In one aspect, the antigen binding domain of a CAR of the invention (e.g., a scFv) is encoded by a nucleic acid molecule whose sequence has been codon optimized for expression in a mammalian cell. In one aspect, entire CAR construct of the invention is encoded by a nucleic acid molecule whose entire sequence has been codon optimized for expression in a mammalian cell. Codon optimization refers to the discovery that the frequency of occurrence of synonymous codons (i.e., codons that code for the same amino acid) in coding DNA is biased in different species. Such codon degeneracy allows an identical polypeptide to be encoded by a variety of nucleotide sequences. A variety of codon optimization methods is known in the art, and include, e.g., methods disclosed in at least U.S. Pat. Nos. 5,786,464 and 6,114,148. In one embodiment, the CAR comprises an antigen binding domain that binds to a B cell. Cell surface markers selectively found on B cells may act as an antigen that binds to the antigen binding domain of the CAR. The anti-B cell antigen binding domain can include any domain that binds to the B cell and may include, but is not limited to, a monoclonal antibody, a polyclonal antibody, a synthetic antibody, a human antibody, a humanized antibody, a non-human antibody, and any fragment thereof. Thus, in one embodiment, the antigen binding domain portion comprises a mammalian antibody or a fragment thereof, such as a single chain variable fragment (scFv). The antigen binding domain may bind one or more antigens, such as, but not limited to, any surface marker selectively found on a B cell, such as a pro-B cell, pre-B cell, immature B cell, mature B cell, memory B cell, and plasma cell. In one embodiment, the antigen binding domain binds at least one antigen, such as CD19, BCMA, and any combination thereof. In another embodiment, the antigen binding domain binds at least one antigen, such as CD20, CD21, CD27, CD38, CD138, and any combination thereof. In some instances, it is beneficial for the antigen binding domain to be derived from the same species in which the CAR will ultimately be used in. For example, for use in humans, it may be beneficial for the antigen binding domain of the CAR to comprise a human antibody, humanized antibody as described elsewhere herein, or a fragment thereof.

[0357] Tumor Antigens

[0358] In some embodiments, an antigen binding domain of the CAR specifically targets a tumor antigen. There are two classes of tumor antigens (tumour antigens, TA) that can be targeted by CARs: (1) a tumor antigen that is expressed on the surface of cancer cells; and (2) a tumor antigen that itself is intracellular, however, a fragment of such antigen (peptide) is presented on the surface of the cancer cells by MHC (major histocompatibility complex).

[0359] In one embodiment, the tumor antigen is expressed on both normal cells and cancer cells, but is expressed at lower levels on normal cells. In one embodiment, the method further comprises selecting a CAR that binds a tumor antigen with an affinity that allows the cell engineered to express the CAR to bind and kill the cancer cells expressing a tumor antigen but less than 30%, 25%, 20%, 15%, 10%, 5% or less of the normal cells expressing a tumor antigen are killed, e.g., as determined by an assay described herein. For example, a killing assay such as flow cytometry based on Cr51 CTL can be used. In one embodiment, the selected CAR has an antigen binding domain that has a binding affinity K_{D} of 10⁻⁴ M to 10⁻⁸ M, e.g., 10⁻⁸ M to 10⁻⁷ M, e.g., 10⁻⁶ M or 10⁻⁷ M, for the target antigen. In one embodiment, the selected antigen binding domain has a binding affinity that is at least five-fold, 10-fold, 20-fold, 30-fold, 50-fold, 100-fold or 1,000-fold less than a reference antibody, e.g., an antibody described herein. Accordingly, a cell can be engineered to express a CAR comprising an antigen binding domain that can target, e.g., bind to, any one of the exemplary tumor antigens (tumour antigens): CD123, CD30, CD171, CS-1, CLL-1 (CLECL1), CD33, EGFRvIII, GD2, GD3, Tn Ag, sTn Ag, Tn-O-Glycopeptides, Stn-O-Glycopeptides, PSMA, FLT3, FAP, TAG72, CD44v6, CEA, EPCAM, B7H3, KIT, IL-13Ra2, Mesothelin, IL-11Ra, PSCA, VEGFR2, LewisY, PDGFR-beta, PRSS21, SSEA-4, Folate receptor alpha, ERBB2 (Her2/neu), MUC1, EGFR, NCAM, Prostase, PAP, ELF2M, Ephrin B2, IGF-I receptor, CAIX, LMP2, gp100, bcr-abl, tyrosinase, EphA2, Fucosyl GM1, sLe, GM3, TGS5, HMWMAA, o-acetyl-GD2, Folate receptor beta, TEM1/CD248, TEM7R, CLDN6, TSHR, GPRC5D, CXORF61, CD97, CD179a, ALK, Plysialic acid, PLAC1, GloboH, NY-BR-1, UPK2, HAVCR1, ADRB3, PANX3, GPR20, LY6K, OR51E2, TARP, WT1, NY-ESO-1, LAGE-1a, legumain, HPV E6,E7, MAGE-A1, MAGE A1, ETV6-AML, sperm protein 17, XAGE1, Tie 2, MAD-CT-1, MAD-CT-2, Fos-related antigen 1, p53, p53 mutant, prostein, survivin and telomerase, PCTA-1/Galectin 8, MelanA/MART1, Ras mutant, hTERT, sarcoma translocation breakpoints, ML-IAP, ERG (TMPRSS2 ETS fusion gene), NA17, PAX3, Androgen receptor, Cyclin B1, MYCN, RhoC, TRP-2, CYP1B1, BORIS, SART3, PAX5, OY-TES1, LCK, AKAP-4, SSX2, RAGE-1, human telomerase reverse transcriptase, RU1, RU2, intestinal carboxyl esterase, mut hsp70-2, LAIR1, FCAR, LILRA2, CD300LF, CLEC12A, BST2, EMR2, LY75, GPC3, FCRL5, IGLL1, CD10, CD19, CD20, CD21, CD22, CD23, CD24, CD25, CD37, CD38, CD53, CD72, CD73, CD74, CD75, CD77, CD79a, CD79b, CD80, CD81, CD82, CD83, CD84, CD85, ROR1, BCMA, CD86, and CD179b. Other B cell antigens that can be targeted by a CAR described herein include: CD1a, CD1b, CD1c, CD1d, CD2, CD5, CD6, CD9, CD11a, CD11 b, CD11c, CD17, CD18, CD26, CD27, CD29, CD30, CD31, CD32a, CD32b, CD35, CD38, CD39, CD40, CD44, CD45, CD45RA, CD45RB, CD45RC, CD45RO, CD46, CD47, CD48, CD49b, CD49c, CD49d, CD50, CD52, CD54, CD55, CD58, CD60a, CD62L, CD63, CD63, CD68 CD69, CD70, CD85E, CD85I, CD85J, CD92, CD95, CD97, CD98, CD99, CD100, CD102, CD108, CD119, CD120a, CD120b, CD121b, CD122, CD124, CD125, CD126, CD130, CD132, CD137, CD138, CD139, CD147, CD148, CD150, CD152, CD162, CD164, CD166, CD167a, CD170, CD175, CD175s, CD180, CD184, CD185, CD192, CD196, CD197, CD200, CD205, CD210a, CDw210b, CD212, CD213a1, CD213a2, CD215, CD217, CD218a, CD218b, CD220, CD221, CD224, CD225, CD226, CD227, CD229, CD230, CD232, CD252, CD253, CD257, CD258, CD261, CD262, CD263, CD264, CD267, CD268, CD269, CD270, CD272, CD274, CD275, CD277, CD279, CD283, CD289, CD290, CD295, CD298, CD300a, CD300c, CD305, CD306, CD307a, CD307b, CD307c, CD307d, CD307e, CD314, CD315, CD316, CD317, CD319, CD321, CD327, CD328, CD329, CD338, CD351, CD352, CD353, CD354, CD355, CD357, CD358, CD360, CD361, CD362, CD363 and peptides of these antigens presented on MHC.

[0360] In some embodiments, the antigen binding domain of a CAR targets a tumor antigen that is associated with a solid tumor, e.g., expressed by a solid tumor cell, referred to herein as a solid tumor associated antigen, e.g., an antigen associated with mesothelioma (e.g., malignant pleural mesothelioma), lung cancer (e.g., non-small cell lung cancer, small cell lung cancer, squamous cell lung cancer, or large cell lung cancer), pancreatic cancer (e.g., pancreatic ductal adenocarcinoma), esophageal adenocarcinoma, ovarian cancer, breast cancer, colorectal cancer and bladder cancer or any combination thereof. In one embodiment, the disease is pancreatic cancer, e.g., metastatic pancreatic ductal adenocarcinoma (PDA), e.g., in a subject who has progressed on at least one prior standard therapy. In one embodiment, the disease is mesothelioma (e.g., malignant pleural mesothelioma), e.g., in a subject who has progressed on at least one prior standard therapy. In one embodiment, the disease is ovarian cancer, e.g., serous epithelial ovarian cancer, e.g., in a subject who has progressed after at least one prior regimen of standard therapy.

[0361] Examples of tumor associated antigens (e.g., solid tumor antigens) include, without limitation: EGFRvIII, mesothelin, GD2, Tn antigen, sTn antigen, Tn-O-Glycopeptides, sTn-O-Glycopeptides, PSMA, CD97, TAG72, CD44v6, CEA, EPCAM, KIT, IL-13Ra2, leguman, GD3, CD171, IL-11Ra, PSCA, MAD-CT-1, MAD-CT-2, VEGFR2, LewisY, CD24, PDGFR-beta, SSEA-4, folate receptor alpha, ERBBs (e.g., ERBB2), Her2/neu, MUC1, EGFR, NCAM, Ephrin B2, CAIX, LMP2, sLe, HMWMAA, o-acetyl-GD2, folate receptor beta, TEM1/CD248, TEM7R, FAP, Legumain, HPV E6 or E7, ML-IAP, CLDN6, TSHR, GPRC5D, ALK, Polysialic acid, Fos-related antigen, neutrophil elastase, TRP-2, CYP1B1, sperm protein 17, beta human chorionic gonadotropin, AFP, thyroglobulin, PLAC1, globoH, RAGE1, MN-CA IX, human telomerase reverse transcriptase, intestinal carboxyl esterase, mut hsp 70-2, NA-17, NY-BR-1, UPK2, HAVCR1, ADRB3, PANX3, NY-ESO-1, GPR20, Ly6k, OR51E2, TARP, GFRα4, and a peptide of any of these antigens presented on MHC.

[0362] In an embodiment, the antigen binding domain of a CAR binds to human mesothelin. In an embodiment, the antigen binding domain is a murine scFv domain that binds to human mesothelin, e.g., SS1 as shown in Table 3. In an embodiment, the antigen binding domain is a humanized antibody or antibody fragment, e.g., scFv domain, derived from the murine SS1 scFv. In an embodiment, the antigen binding domain is a human antibody or antibody fragment that binds to human mesothelin. Exemplary human scFv domains (and their sequences) and the murine SS1 scFv that bind to mesothelin are provided in Table 3. CDR sequences are underlined. The scFv domain sequences provided in Table 3 include a light chain variable region (VL) and a heavy chain variable region (VH). The VL and VH are attached by a linker comprising the sequence GGGGSGGGGSGGGGS (SEQ ID NO: 30) (e.g., as shown in SS1 scFv domains) or GGGGSGGGGSGGGGSGGGGS (SEQ ID NO: 29) (e.g., as shown in M1, M2, M3, M4, M5, M6, M7, M8, M9, M10, M11, M12, M13, M14, M15, M16, M17, M18, M19, M20, M21, M22, M23, or M24 scFv domains). The scFv domains listed in Table 3 are in the following orientation: VL-linker-VH.

TABLE 3
Antigen binding domains that bind to mesothelin

| | | | SEQ |
|---|---|---|---|
| Tumor | | | ID |
| antigen | Name | Amino acid sequence | NO: |
| mesothelin | M5 | QVQLVQSGAEVEKPGASVKVSCKASGYTFTDYYMHWVRQAPGQ | 201 |
| | (human) | GLEWMGWINPNSGGTNYAQKFQGRVTMTRDTSISTAYMELSRLR | |
| | | SDDTAVYYCASGWDFDYWGQGTLVTVSSGGGGSGGGGSGGGG | |
| | | SGGGGSDIVMTQSPSSLSASVGDRVTITCRASQSIRYYLSWYQQK | |
| | | PGKAPKLLIYTASILQNGVPSRFSGSGSGTDFTLTISSLQPEDFATY | |
| | | YCLQTYTTPDFGPGTKVEIK | |
| mesothelin | M11 | QVQLQQSGAEVKKPGASVKVSCKASGYTFTGYYMHWVRQAPGQ | 202 |
| | (human) | GLEWMGWINPNSGGTNYAQNFQGRVTMTRDTSISTAYMELRRLR | |
| | | SDDTAVYYCASGWDFDYWGQGTLVTVSSGGGGSGGGGSGGGG | |
| | | SGGGGSDIRMTQSPSSLSASVGDRVTITCRASQSIRYYLSWYQQK | |
| | | PGKAPKLLIYTASILQNGVPSRFSGSGSGTDFTLTISSLQPEDFATY | |
| | | YCLQTYTTPDFGPGTKVEIK | |
| mesothelin | ss1 | QVQLQQSGPELEKPGASVKISCKASGYSFTGYTMNWVKQSHGKS | 203 |
| | (murine) | LEWIGLITPYNGASSYNQKFRGKATLTVDKSSSTAYMDLLSLTSED | |
| | | SAVYFCARGGYDGRGFDYWGQGTTVTVSSGGGGSGGGGSGGG | |
| | | GSDIELTQSPAIMSASPGEKVTMTCSASSSVSYMHWYQQKSGTS | |
| | | PKRWIYDTSKLASGVPGRFSGSGSGNSYSLTISSVEAEDDATYYC | |
| | | QQWSGYPLTFGAGTKLEI | |
| mesothelin | M1 | QVQLQQSGAEVKKPGASVKVSCKASGYTFTGYYMHWVRQAPGQ | 204 |
| | (human) | GLEWMGRINPNSGGTNYAQKFQGRVTMTRDTSISTAYMELSRLR | |
| | | SEDTAVYYCARGRYYGMDVWGQGTMVTVSSGGGGSGGGGSGG | |
| | | GGSGGGGSEIVLTQSPATLSLSPGERATISCRASQSVSSNFAWYQ | |
| | | QRPGQAPRLLIYDASNRATGIPPRFSGSGSGTDFTLTISSLEPEDF | |
| | | AAYYCHQRSNWLYTFGQGTKVDIK | |
| mesothelin | M2 | QVQLVQSGAEVKKPGASVKVSCKASGYTFTGYYMHWVRQAPGQ | 205 |
| | (human) | GLEWMGWINPNSGGTNYAQKFQGRVTMTRDTSISTAYMELSRLR | |
| | | SDDTAVYYCARDLRRTVVTPRAYYGMDVWGQGTTVTVSSGGGG | |
| | | SGGGGSGGGGSGGGGSDIQLTQSPSTLSASVGDRVTITCQASQD | |
| | | ISNSLNWYQQKAGKAPKLLIYDASTLETGVPSRFSGSGSGTDFSFT | |
| | | ISSLQPEDIATYYCQQHDNLPLTFGQGTKVEIK | |
| mesothelin | M3 | QVQLVQSGAEVKKPGAPVKVSCKASGYTFTGYYMHWVRQAPGQ | 206 |
| | (human) | GLEWMGWINPNSGGTNYAQKFQGRVTMTRDTSISTAYMELSRLR | |
| | | SDDTAVYYCARGEWDGSYYYDYWGQGTLVTVSSGGGGSGGGG | |
| | | SGGGGSGGGGSDIVLTQTPSSLSASVGDRVTITCRASQSINTYLN | |
| | | WYQHKPGKAPKLLIYAASSLQSGVPSRFSGSGSGTDFTLTISSLQP | |
| | | EDFATYYCQQSFSPLTFGGGTKLEIK | |
| mesothelin | M4 | QVQLVESGGGLVQPGGSLRLSCAASGFTFSSYWMHWVRQVPGK | 207 |
| | (human) | GLVWVSRINTDGSTTTYADSVEGRFTISRDNAKNTLYLQMNSLRD | |
| | | DDTAVYYCVGGHWAVWGQGTTVTVSSGGGGSGGGGSGGGGS | |
| | | GGGGSDIQMTQSPSTLSASVGDRVTITCRASQSISDRLAWYQQKP | |
| | | GKAPKLLIYKASSLESGVPSRFSGSGSGTEFTLTISSLQPDDFAVY | |
| | | YCQQYGHLPMYTFGQGTKVEIK | |
| mesothelin | M6 | QVQLVQSGAEVKKPGASVKVSCKASGYTFTSYYMHWVRQAPGQ | 208 |
| | (human) | GLEWMGIINPSGGSTSYAQKFQGRVTMTRDTSTSTVYMELSSLRS | |
| | | EDTAVYYCARYRLIAVAGDYYYYGMDVWGQGTMVTVSSGGGGS | |
| | | GGGGSGGGGSGGGGSDIQMTQSPSSVASVGDRVTITCRASQGV | |
| | | GRWLAWYQQKPGTAPKLLIYAASTLQSGVPSRFSGSGSGTDFTLT | |
| | | INNLQPEDFATYYCQQANSFPLTFGGGTRLEIK | |
| mesothelin | M7 | QVQLVQSGGGVVQPGRSLRLSCAASGFTFSSYAMHWVRQAPGK | 209 |
| | (human) | GLEWVAVISYDGSNKYYADSVKGRFTISRDNSKNTLYLQMNSLRA | |
| | | EDTAVYYCARWKVSSSSPAFDYWGQGTLVTVSSGGGGSGGGGS | |
| | | GGGGSGGGGSEIVLTQSPATLSLSPGERAILSCRASQSVYTKYLG | |
| | | WYQQKPGQAPRLLIYDASTRATGIPDRFSGSGSGTDFTLTINRLEP | |
| | | EDFAVYYCQHYGGSPLITFGQGTRLEIK | |
| mesothelin | M8 | QVQLQQSGAEVKKPGASVKVSCKTSGYPFTGYSLHWVRQAPGQ | 210 |
| | (human) | GLEWMGWINPNSGGTNYAQKFQGRVTMTRDTSISTAYMELSRLR | |
| | | SDDTAVYYCARDHYGGNSLFYWGQGTLVTVSSGGGGSGGGGS | |
| | | GGGGSGGGGSDIQLTQSPSSISASVGDTVSITCRASQDSGTWLA | |
| | | WYQQKPGKAPNLLMYDASTLEDGVPSRFSGSASGTEFTLTVNRL | |
| | | QPEDSATYYCQQYNSYPLTFGGGTKVDIK | |
| mesothelin | M9 | QVQLVQSGAEVKKPGASVEVSCKASGYTFTSYYMHWVRQAPGQ | 211 |
| | (human) | GLEWMGIINPSGGSTGYAQKFQGRVTMTRDTSTSTVHMELSSLR | |
| | | SEDTAVYYCARGGYSSSSDAFDIWGQGTMVTVSSGGGGSGGGG | |
| | | SGGGGSGGGGSDIQMTQSPPSLSASVGDRVTITCRASQDISSALA | |
| | | WYQQKPGTPPKLLIYDASSLESGVPSRFSGSGSGTDFTLTISSLQP | |
| | | EDFATYYCQQFSSYPLTFGGGTRLEIK | |
| mesothelin | M10 | QVQLVQSGAEVKKPGASVKVSCKASGYTFTSYGISWVRQAPGQG | 212 |
| | (human) | LEWMGWISAYNGNTNYAQKLQGRVTMTTDTSTSTAYMELRSLRS | |
| | | DDTAVYYCARVAGGIYYYYGMDVWGQGTTITVSSGGGGSGGGG | |
| | | SGGGGSGGGGSDIVMTQTPDSLAVSLGERATISCKSSHSVLYNR | |
| | | NNKNYLAWYQQKPGQPPKLLFYWASTRKSGVPDRFSGSGSGTD | |
| | | FTLTISSLQPEDFATYFCQQTQTFPLTFGQGTRLEIN | |
| mesothelin | M12 | QVQLVQSGAEVKKPGASVKVSCKASGYTFTGYYMHWVRQAPGQ | 213 |
| | (human) | GLEWMGRINPNSGGTNYAQKFQGRVTMTTDTSTSTAYMELRSLR | |
| | | SDDTAVYYCARTTTSYAFDIWGQGTMVTVSSGGGGSGGGGSGG | |
| | | GGSGGGGSDIQLTQSPSTLSASVGDRVTITCRASQSISTWLAWYQ | |
| | | QKPGKAPNLLIYKASTLESGVPSRFSGSGSGTEFTLTISSLQPDDF | |
| | | ATYYCQQYNTYSPYTFGQGTKLEIK | |
| mesothelin | M13 | QVQLVQSGGGLVKPGGSLRLSCEASGFIFSDYYMGWIRQAPGKG | 214 |
| | (human) | LEWVSYIGRSGSSMYYADSVKGRFTFSRDNAKNSLYLQMNSLRA | |
| | | EDTAVYYCAASPVVAATEDFQHWGQGTLVTVSSGGGGSGGGGS | |
| | | GGGGSGGGGSDIVMTQTPATLSLSPGERATLSCRASQSVTSNYL | |
| | | AWYQQKPGQAPRLLLFGASTRATGIPDRFSGSGSGTDFTLTINRL | |
| | | EPEDFAMYYCQQYGSAPVTFGQGTKLEIK | |
| mesothelin | M14 | QVQLVQSGAEVRAPGASVKISCKASGFTFRGYYIHWVRQAPGQG | 215 |
| | (human) | LEWMGIINPSGGSRAYAQKFQGRVTMTRDTSTSTVYMELSSLRSD | |
| | | DTAMYYCARTASCGGDCYYLDYWGQGTLVTVSSGGGGSGGGG | |
| | | SGGGGSGGGGSDIQMTQSPPTLSASVGDRVTITCRASENVNIWL | |
| | | AWYQQKPGKAPKLLIYKSSSLASGVPSRFSGSGSGAEFTLTISSLQ | |
| | | PDDFATYYCQQYQSYPLTFGGGTKVDIK | |
| mesothelin | M15 | QVQLVQSGGGLVQPGRSLRLSCAASGFTFDDYAMHWVRQAPGK | 216 |
| | (human) | GLEWVSGISWNSGSIGYADSVKGRFTISRDNAKNSLYLQMNSLRA | |
| | | EDTAVYYCAKDGSSSWSWGYFDYWGQGTLVTVSSGGGGSGGG | |
| | | GSGGGGSSSELTQDPAVSVALGQTVRTTCQGDALRSYYASWYQ | |
| | | QKPGQAPMLVIYGKNNRPSGIPDRFSGSDSGDTASLTITGAQAED | |
| | | EADYYCNSRDSSGYPVFGTGTKVTVL | |
| mesothelin | M16 | EVQLVESGGGLVQPGRSLRLSCAASGFTFDDYAMHWVRQAPGK | 217 |
| | (human) | GLEWVSGISWNSGSTGYADSVKGRFTISRDNAKNSLYLQMNSLR | |
| | | AEDTALYYCAKDSSSWYGGGSAFDIWGQGTMVTVSSGGGGSGG | |
| | | GGSGGGGSSSELTQEPAVSVALGQTVRITCQGDSLRSYYASWYQ | |
| | | QKPGQAPVLVIFGRSRRPSGIPDRFSGSSSGNTASLIITGAQAEDE | |
| | | ADYYCNSRDNTANHYVFGTGTKLTVL | |
| mesothelin | M17 | EVQLVESGGGLVQPGRSLRLSCAASGFTFDDYAMHWVRQAPGK | 218 |
| | (human) | GLEWVSGISWNSGSTGYADSVKGRFTISRDNAKNSLYLQMNSLR | |
| | | AEDTALYYCAKDSSSWYGGGSAFDIWGQGTMVTVSSGGGGSGG | |
| | | GGSGGGGSSSELTQDPAVSVALGQTVRITCQGDSLRSYYASWYQ | |
| | | QKPGQAPVLVIYGKNNRPSGIPDRFSGSSSGNTASLTITGAQAED | |
| | | EADYYCNSRGSSGNHYVFGTGTKVTVL | |
| mesothelin | M18 | QVQLVQSGGGLVQPGGSLRLSCAASGFTFSSYWMHWVRQAPGK | 219 |
| | (human) | GLVWVSRINSDGSSTSYADSVKGRFTISRDNAKNTLYLQMNSLRA | |
| | | EDTAVYYCVRTGWVGSYYYYMDVWGKGTTVTVSSGGGGSGGG | |
| | | GSGGGGSGGGGSEIVLTQSPGTLSLSPGERATLSCRASQSVSSN | |
| | | YLAWYQQKPGQPPRLLIYDVSTRATGIPARFSGGGSGTDFTLTISS | |
| | | LEPEDFAVYYCQQRSNWPPWTFGQGTKVEIK | |
| mesothelin | M19 | QVQLVQSGGGVVQPGRSLRLSCAASGFTFSSYGMHWVRQAPGK | 220 |
| | (human) | GLEWVAVISYDGSNKYYADSVKGRFTISRDNSKNTLYLQMNSLRA | |
| | | EDTAVYYCAKGYSRYYYYGMDVWGQGTTVTVSSGGGGSGGGG | |
| | | SGGGGSGGGGSEIVMTQSPATLSLSPGERAILSCRASQSVYTKYL | |
| | | GWYQQKPGQAPRLLIYDASTRATGIPDRFSGSGSGTDFTLTINRLE | |
| | | PEDFAVYYCQHYGGSPLITFGQGTKVDIK | |
| mesothelin | M20 | QVQLVQSGGGLVQPGGSLRLSCAASGFTFSSYAMSWVRQAPGK | 221 |
| | (human) | GLEWVSAISGSGGSTYYADSVKGRFTISRDNSKNTLYLQMNSLRA | |
| | | EDTAVYYCAKREAAAGHDWYFDLWGRGTLVTVSSGGGGSGGGG | |
| | | SGGGGSGGGGSDIRVTQSPSSLSASVGDRVTITCRASQSISSYLN | |
| | | WYQQKPGKAPKLLIYAASSLQSGVPSRFSGSGSGTDFTLTISSLQ | |
| | | PEDFATYYCQQSYSIPLTFGQGTKVEIK | |
| mesothelin | M21 | QVQLVQSWAEVKKPGASVKVSCKASGYTFTSYYMHWVRQAPGQ | 222 |
| | (human) | GLEWMGIINPSGGSTSYAQKFQGRVTMTRDTSTSTVYMELSNLRS | |
| | | EDTAVYYCARSPRVTTGYFDYWGQGTLVTVSSGGGGSGGGGSG | |
| | | GGGSGGGGSDIQLTQSPSTLSASVGDRVTITCRASQSISSWLAWY | |
| | | QQKPGKAPKLLIYKASSLESGVPSRFSGSGSGTEFTLTISSLQPDD | |
| | | FATYYCQQYSSYPLTFGGGTRLEIK | |
| mesothelin | M22 | QVQLVQSGAEVRRPGASVKISCRASGDTSTRHYIHWLRQAPGQG | 223 |
| | (human) | PEWMGVINPTTGPATGSPAYAQMLQGRVTMTRDTSTRTVYMELR | |
| | | SLRFEDTAVYYCARSVVGRSAPYYFDYWGQGTLVTVSSGGGGS | |
| | | GGGGSGGGGSGGGGSDIQMTQSPSSLSASVGDRVTITCRASQGI | |
| | | SDYSAWYQQKPGKAPKLLIYAASTLQSGVPSRFSGSGSGTDFTLT | |
| | | ISYLQSEDFATYYCQQYYSYPLTFGGGTKVDIK | |
| mesothelin | M23 | QVQLQQSGAEVKKPGASVKVSCKASGYTFTNYYMHWVRQAPGQ | 224 |
| | (human) | GLEWMGIINPSGGYTTYAQKFQGRLTMTRDTSTSTVYMELSSLRS | |
| | | EDTAVYYCARIRSCGGDCYYFDNWGQGTLVTVSSGGGGSGGGG | |
| | | SGGGGSGGGGSDIQLTQSPSTLSASVGDRVTITCRASENVNIWLA | |
| | | WYQQKPGKAPKLLIYKSSSLASGVPSRFSGSGSGAEFTLTISSLQP | |
| | | DDFATYYCQQYQSYPLTFGGGTKVDIK | |
| mesothelin | M24 | QITLKESGPALVKPTQTLTLTCTFSGFSLSTAGVHVGWIRQPPGKA | 225 |
| | (human) | LEWLALISWADDKRYRPSLRSRLDITRVTSKDQVVLSMTNMQPED | |
| | | TATYYCALQGFDGYEANWGPGTLVTVSSGGGGSGGGGSGGGG | |
| | | SGGGGSDIVMTQSPSSLSASAGDRVTITCRASRGISSALAWYQQK | |
| | | PGKPPKLLIYDASSLESGVPSRFSGSGSGTDFTLTIDSLEPEDFAT | |
| | | YYCQQSYSTPWTFGQGTKVDIK | |

[0363] The CDR sequences of the scFv domains of the mesothelin antigen binding domains provided in Table 3 are shown in Table 4 for the heavy chain variable domains and in Table 5 for the light chain variable domains.

TABLE 4
Amino acid sequences for the heavy chain (HC) CDR1, CDR2, and CDR3
regions of human anti-mesothelin scFvs

| | | SEQ | | SEQ | | SEQ |
|---|---|---|---|---|---|---|
| | | ID | | ID | | ID |
| Descrip. | HC-CDR1 | NO: | HC-CDR2 | NO: | HC-CDR3 | NO: |
| M5 | GYTFTDYYMH | 226 | WINPNSGGTNYAQKFQG | 227 | GWDFDY | 228 |
| M11 | GYTFTGYYMH | 229 | WINPNSGGTNYAQNFQG | 230 | GWDFDY | 228 |
| SS1 | GYSFTGYTMN | 231 | LITPYNGASSYNQKFRG | 232 | GGYDGRGFDY | 233 |
| M1 | GYTFTGYYMH | 229 | RINPNSGGTNYAQKFQG | 234 | GRYYGMDV | 235 |
| M2 | GYTFTGYYMH | 229 | WINPNSGGTNYAQKFQG | 227 | DLRRTVVTPRAYY | 236 |
| | | | | | GMDV | |
| M3 | GYTFTGYYMH | 229 | WINPNSGGTNYAQKFQG | 227 | GEWDGSYYYDY | 237 |
| M4 | GFTFSSYWMH | 238 | RINTDGSTTTYADSVEG | 239 | GHWAV | 240 |
| M6 | GYTFTSYYMH | 241 | IINPSGGSTSYAQKFQ | 242 | YRLIAVAGDYYYY | 243 |
| | | | | | GMDV | |
| M7 | GFTFSSYAMH | 244 | VISYDGSNKYYADSVKG | 245 | WKVSSSSPAFDY | 246 |
| M8 | GYPFTGYSLH | 247 | WINPNSGGTNYAQKFQG | 227 | DHYGGNSLFY | 248 |
| M9 | GYTFTSYYMH | 241 | IINPSGGSTGYAQKFQG | 249 | GGYSSSSDAFDI | 250 |
| M10 | GYTFTSYGIS | 251 | WISAYNGNTNYAQKLQ | 252 | VAGGIYYYYGMD | 253 |
| | | | | | V | |
| M12 | GYTFTGYYMH | 229 | RINPNSGGTNYAQKFQG | 234 | TTTSYAFDI | 254 |
| M13 | GFIFSDYYMG | 255 | YIGRSGSSMYYADSVKG | 256 | SPVVAATEDFQH | 257 |
| M14 | GFTFRGYYIH | 258 | IINPSGGSRAYAQKFQG | 259 | TASCGGDCYYLD | 260 |
| | | | | | Y | |
| M15 | GFTFDDYAMH | 261 | GISWNSGSIGYADSVK | 262 | DGSSSWSWGYF | 263 |
| | | | | | DY | |
| M16 | GFTFDDYAMH | 261 | GISWNSGSTGYADSVKG | 264 | DSSSWYGGGSAF | 265 |
| | | | | | DI | |
| M17 | GFTFDDYAMH | 261 | GISWNSGSTGYADSVKG | 264 | DSSSWYGGGSAF | 265 |
| | | | | | DI | |
| M18 | GFTFSSYWMH | 238 | RINSDGSSTSYADSVKG | 266 | TGWVGSYYYYMD | 267 |
| | | | | | V | |
| M19 | GFTFSSYGMH | 268 | VISYDGSNKYYADSVKG | 245 | GYSRYYYYGMDV | 269 |
| M20 | GFTFSSYAMS | 270 | AISGSGGSTYYADSVKG | 271 | REAAAGHDWYFD | 272 |
| | | | | | L | |
| M21 | GYTFTSYYMH | 241 | IINPSGGSTSYAQKFQG | 273 | SPRVTTGYFDY | 274 |
| M22 | GDTSTRHYIH | 275 | VINPTTGPATGSPAYAQ | 276 | SVVGRSAPYYFD | 277 |
| | | | MLQG | | Y | |
| M23 | GYTFTNYYMH | 278 | IINPSGGYTTYAQKFQG | 279 | IRSCGGDCYYFDN | 280 |
| M24 | GFSLSTAGVH | 281 | LISWADDKRYRPSLRS | 282 | QGFDGYEAN | 283 |
| | VG | | | | | |

TABLE 5
Amino acid sequences for the light chain (LC) CDR1, CDR2, and
CDR3 regions of human anti-mesothelin scFvs

| | | SEQ | | SEQ | | SEQ |
|---|---|---|---|---|---|---|
| | | ID | | ID | | ID |
| Description | LC-CDR1 | NO: | LC-CDR2 | NO: | LC-CDR3 | NO: |
| M5 | RASQSIRYYLS | 284 | TASILQN | 285 | LQTYTTPD | 286 |
| M11 | RASQSIRYYLS | 284 | TASILQN | 285 | LQTYTTPD | 286 |
| SS1 | SASSSVSYMH | 287 | DTSKLAS | 288 | QQWSGYPLT | 289 |
| M1 | RASQSVSSNFA | 290 | DASNRAT | 291 | HQRSNWLYT | 292 |
| M2 | QASQDISNSLN | 293 | DASTLET | 294 | QQHDNLPLT | 295 |
| M3 | RASQSINTYLN | 296 | AASSLQS | 297 | QQSFSPLT | 298 |
| M4 | RASQSISDRLA | 299 | KASSLES | 300 | QQYGHLPMYT | 301 |
| M6 | RASQGVGRWLA | 302 | AASTLQS | 303 | QQANSFPLT | 304 |
| M7 | RASQSVYTKYLG | 305 | DASTRAT | 306 | QHYGGSPLIT | 307 |
| M8 | RASQDSGTWLA | 308 | DASTLED | 309 | QQYNSYPLT | 310 |
| M9 | RASQDISSALA | 311 | DASSLES | 312 | QQFSSYPLT | 313 |
| M10 | KSSHSVLYNRNNKNYLA | 314 | WASTRKS | 315 | QQTQTFPLT | 316 |
| M12 | RASQSISTWLA | 317 | KASTLES | 318 | QQYNTYSPYT | 319 |
| M13 | RASQSVTSNYLA | 320 | GASTRAT | 321 | QQYGSAPVT | 322 |
| M14 | RASENVNIWLA | 323 | KSSSLAS | 324 | QQYQSYPLT | 325 |
| M15 | QGDALRSYYAS | 326 | GKNNRPS | 327 | NSRDSSGYPV | 328 |
| M16 | QGDSLRSYYAS | 329 | GRSRRPS | 330 | NSRDNTANHYV | 331 |
| M17 | QGDSLRSYYAS | 329 | GKNNRPS | 327 | NSRGSSGNHYV | 332 |
| M18 | RASQSVSSNYLA | 333 | DVSTRAT | 334 | QQRSNWPPWT | 335 |
| M19 | RASQSVYTKYLG | 305 | DASTRAT | 306 | QHYGGSPLIT | 307 |
| M20 | RASQSISSYLN | 336 | AASSLQS | 297 | QQSYSIPLT | 337 |
| M21 | RASQSISSWLA | 338 | KASSLES | 300 | QQYSSYPLT | 339 |
| M22 | RASQGISDYS | 340 | AASTLQS | 303 | QQYYSYPLT | 341 |
| M23 | RASENVNIWLA | 323 | KSSSLAS | 324 | QQYQSYPLT | 325 |
| M24 | RASRGISSALA | 342 | DASSLES | 312 | QQSYSTPWT | 343 |

[0364] Any known anti-mesothelin binding domain, from, for example, a known antibody, bispecific molecule or CAR, may be suitable for use in the CAR of the present invention. For example, the antigen binding domain against mesothelin is or may be derived from an antigen binding, e.g., CDRs or VH and VL, of an antibody, antigen-binding fragment or CAR described in, e.g., PCT publication WO2015/090230. In embodiments, the antigen binding domain against mesothelin is or is derived from an antigen binding portion, e.g., CDRs or VH and VL, of an antibody, antigen-binding fragment, or CAR described in, e.g., PCT publication WO1997/025068, WO1999/028471, WO2005/014652, WO2006/099141, WO2009/045957, WO2009/068204, WO2013/142034, WO2013/040557, or WO2013/063419.

[0365] In one embodiment, the mesothelin binding domain comprises one or more (e.g., all three) light chain complementary determining region 1 (LC CDR1), light chain complementary determining region 2 (LC CDR2), and light chain complementary determining region 3 (LC CDR3) of a mesothelin binding domain described herein, e.g., provided in Table 3 or 5, and/or one or more (e.g., all three) heavy chain complementary determining region 1 (HC CDR1), heavy chain complementary determining region 2 (HC CDR2), and heavy chain complementary determining region 3 (HC CDR3) of a mesothelin binding domain described herein, e.g., provided in Table 3 or 4. In one embodiment, the mesothelin binding domain comprises one, two, or all of LC CDR1, LC CDR2, and LC CDR3 of any amino acid sequences as provided in Table 5; and one, two or three of all of HC CDR1, HC CDR2 and HC CDR3, of any amino acid acid sequences as provided in Table 4.

[0366] In one embodiment, the mesothelin binding domain comprises a light chain variable region described herein (e.g., in Table 3) and/or a heavy chain variable region described herein (e.g., in Table 3). In one embodiment, the mesothelin binding domain is a scFv comprising a light chain and a heavy chain of an amino acid sequence listed in Table 3. In an embodiment, the mesothelin binding domain (e.g., an scFv) comprises: a light chain variable region comprising an amino acid sequence having at least one, two or three modifications (e.g., substitutions, e.g., conservative substitutions) but not more than 30, 20 or 10 modifications (e.g., substitutions, e.g., conservative substitutions) of an amino acid sequence of a light chain variable region provided in Table 3, or a sequence with 95-99% identity with an amino acid sequence provided in Table 3; and/or a heavy chain variable region comprising an amino acid sequence having at least one, two or three modifications (e.g., substitutions, e.g., conservative substitutions) but not more than 30, 20 or 10 modifications (e.g., substitutions, e.g., conservative substitutions) of an amino acid sequence of a heavy chain variable region provided in Table 3, or a sequence with 95-99% identity to an amino acid sequence provided in Table 3.

[0367] In one embodiment, the mesothelin binding domain comprises an amino acid sequence selected from any one of SEQ ID NOs: 201-225; or an amino acid sequence having at least one, two or three modifications (e.g., substitutions, e.g., conservative substitutions) but not more than 30, 20 or 10 modifications (e.g., substitutions, e.g., conservative substitutions) to any of the aforesaid sequences; or a sequence with 95-99% identity to any of the aforesaid sequences. In one embodiment, the mesothelin binding domain is a scFv, and a light chain variable region comprising an amino acid sequence described herein, e.g., in Table 3, is attached to a heavy chain variable region comprising an amino acid sequence described herein, e.g., in Table 3, via a linker, e.g., a linker described herein. In one embodiment, the mesothelin binding domain includes a (Gly4-Ser)n linker, wherein n is 1, 2, 3, 4, 5, or 6, preferably 4 (SEQ ID NO: 967). The light chain variable region and heavy chain variable region of a scFv can be, e.g., in any of the following orientations: light chain variable region-linker-heavy chain variable region or heavy chain variable region-linker-light chain variable region.

[0368] In an embodiment, the antigen binding domain of a CAR, e.g., a CAR expressed by a cell of the invention, binds to human EGFRvIII. In an embodiment, the antigen binding domain is a murine scFv domain that binds to human EGFRvIII such as, e.g., mu310C. In an embodiment, the antigen binding domain is a humanized antibody or antibody fragment, e.g., scFv domain, derived from the murine mu310C scFv. Exemplary humanized scFv domains (and their sequences) and murine SS1 scFv that bind to EGFRvIII are provided in Table 6.

[0369] In an embodiment, the antigen binding domain of a CAR binds to human claudin 6 (CLDN6). In an embodiment, the antigen binding domain is a murine scFv domain that binds to human CLDN6. In an embodiment, the antigen binding domain is a humanized antibody or antibody fragment. Exemplary scFv domains (and their sequences) that bind to CLDN6 are provided in Table 6. The scFv domain sequences provided in Table 6 include a light chain variable region (VL) and a heavy chain variable region (VH). The VL and VH are attached by a linker comprising the sequence GGGGSGGGGSGGGGSGGGGS (SEQ ID NO: 29), e.g., in the following orientation: VL-linker-VH.

TABLE 6
Antigen binding domains that bind to the tumor antigen EGFRvIII or CLDN6

| Tumor | | | SEQ ID |
|---|---|---|---|
| antigen | Name | Amino acid sequence | NO: |
| EGFR | huscFv1 | Eiqlvqsgaevkkpgatvkisckgsgfniedyyihwyqqapgkglewmgridpendetk | 344 |
| vIII | | ygpifqgrytitadtstntvymelsslrsedtavyycafrggvywgqgttvtvssggggsggg | |
| | | gsggggsggggsdvvrntqspdslavslgeratinckssqslldsdgktylnwlqqkpgqp | |
| | | pkrlislyskldsgypdrfsgsgsgtdftltisslqaedvavyycwqgthfpgtfgggtkveik | |
| EGFR | huscFv2 | Dvvmtqspdslavslgeratinckssqslldsdgktylnwlqqkpgqppkrlislyskldsgv | 345 |
| vIII | | pdrfsgsgsgtdftltisslqaedvavyycwqgthfpgtfgggtkveikggggsggggsggg | |
| | | gsggggseiqlvqsgaevkkpgatvkisckgsgfniedyyihwvqqapgkglewmgrid | |
| | | pendetkygpifqgrvtitadtstntvymelsslrsedtavyycafrggvywgqgttvtvss | |
| EGFR | huscFv3 | Eiqlvqsgaeykkpgeslrisckgsgfniedyyihwyrqmpgkglewmgridpendetk | 346 |
| vIII | | ygpifqghytisadtsintyylqwsslkasdtamyycafrggvywgqgttvtvssggggsg | |
| | | gggsggggsggggsdvvrntqsplslpvtlgqpasisckssqslldsdgktylnwlqqrpg | |
| | | qsprrlislyskldsgypdrfsgsgsgtdftlkisrveaedvgvyycwqgthfpgtfgggtkveik | |
| EGFR | huscFv4 | DyymtqspIslpvtlgqpasisckssqslldsdgktylnwlqqrpgqsprrlislyskIdsgyp | 347 |
| vIII | | drfsgsgsgtdftlkisrveaedvgvyycwqgthfpgtfgggtkveikggggsggggsggg | |
| | | gsggggseiqlvqsgaevkkpgeslrisckgsgfniedyyihwvrqmpgkglewmgrid | |
| | | pendetkygpifqghvtisadtsintvylqwsslkasdtamyycafrggvywgqgttvtvss | |
| EGFR | huscFv5 | Eiqlvqsgaevkkpgatvkisckgsgfniedyyihwvqqapgkglewmgridpendetk | 348 |
| vIII | | ygpifqgrvtitadtstntvymelsslrsedtavyycafrggvywgqgttvtvssggggsggg | |
| | | gsggggsggggsdvvmtqsplslpvtlgqpasisckssqslldsdgktylnwlqqrpgqs | |
| | | prrlislvskldsgvpdrfsgsgsgtdftlkisrveaedvgvyycwqgthfpgtfgggtkveik | |
| EGFR | huscFv6 | Eiqlvqsgaevkkpgeslrisckgsgfniedyyihwvrqmpgkglewmgridpendetk | 349 |
| vIII | | ygpifqghvtisadtsintvylqwsslkasdtamyycafrggvywgqgttvtvssggggsg | |
| | | gggsggggsggggsdvvmtqspdslayslgeratinckssqslldsdgktylnwlqqkpg | |
| | | qppkrlislvskldsgvpdrfsgsgsgtdftltisslqaedvavyycwqgthfpgtfgggtkveik | |
| EGFR | huscFv7 | Dvvmtqspdslayslgeratinckssqslldsdgktylnwlqqkpgqppkrlislvskldsgv | 350 |
| vIII | | pdrfsgsgsgtdftltisslqaedvavyycwqgthfpgtfgggtkveikggggsggggsggg | |
| | | gsggggseiqlvqsgaevkkpgeslrisckgsgfniedyyihwvrqmpgkglewmgrid | |
| | | pendetkygpifqghvtisadtsintvylqwsslkasdtamyycafrggvywgqgttvtvss | |
| EGFR | huscFv8 | Dvvmtqsplslpvtlgqpasisckssqslldsdgktylnwlqqrpgqsprrlislvskldsgvp | 351 |
| vIII | | drfsgsgsgtdftlkisrveaedvgvyycwqgthfpgtfgggtkveikggggsggggsggg | |
| | | gsggggseiqlvqsgaevkkpgatvkisckgsgfniedyyihwvqqapgkglewmgrid | |
| | | pendetkygpifqgrvtitadtstntvymelsslrsedtavyycafrggvywgqgttvtvss | |
| EGFR | Mu310C | eiqlqqsgaelvkpgasvklsctgsgfniedyyihwvkqrteqglewigridpendetkygp | 352 |
| vIII | | ifqgratitadtssntvylqlssltsedtavyycafrggvywgpgttltvssggggsggggsgg | |
| | | ggshmdvvmtqspltlsvaigqsasisckssqslldsdgktylnwllqrpgqspkrlislvskl | |
| | | dsgvpdrftgsgsgtdftlrisrveaedlgiyycwqgthfpgtfgggtkleik | |
| Claudin6 | muMAB | EVQLQQSGPELVKPGASMKISCKASGYSFTGYTMNWVKQSHG | 353 |
| | 64A | KNLEWIGLINPYNGGTIYNQKFKGKATLTVDKSSSTAYMELLSLT | |
| | | SEDSAVYYCARDYGFVLDYWGQGTTLTVSSGGGGSGGGGSG | |
| | | GGGSGGGGSQIVLTQSPSIMSVSPGEKVTITCSASSSVSYMHW | |
| | | FQQKPGTSPKLCIYSTSNLASGVPARFSGRGSGTSYSLTISRVA | |
| | | AEDAATYYCQQRSNYPPWTFGGGTKLEIK | |
| Claudin6 | mAb206- | EVQLQQSGPELVKPGASMKISCKASGYSFTGYTMNWVKQSHG | 354 |
| | LCC | KNLEWIGLINPYNGGTIYNQKFKGKATLTVDKSSSTAYMELLSLT | |
| | | SEDSAVYYCARDYGFVLDYWGQGTTLTVSSGGGGSGGGGSG | |
| | | GGGSGGGGSQIVLTQSPAIMSASPGEKVTITCSASSSVSYLHWF | |
| | | QQKPGTSPKLWVYSTSNLPSGVPARFGGSGSGTSYSLTISRME | |
| | | AEDAATYYCQQRSIYPPWTFGGGTKLEIK | |
| Claudin6 | mAb206- | EVQLQQSGPELVKPGASMKISCKASGYSFTGYTMNWVKQSHG | 355 |
| | SUBG | KNLEWIGLINPYNGGTIYNQKFKGKATLTVDKSSSTAYMELLSLT | |
| | | SEDSAVYYCARDYGFVLDYWGQGTTLTVSSGGGGSGGGGSG | |
| | | GGGSGGGGSQIVLTQSPSIMSVSPGEKVTITCSASSSVSYMHW | |
| | | FQQKPGTSPKLGIYSTSNLASGVPARFSGRGSGTSYSLTISRVA | |
| | | AEDAATYYCQQRSNYPPWTFGGGTKLEIK | |

[0370] In one embodiment, the EGFRvIII binding domain comprises one or more (e.g., all three) light chain complementary determining region 1 (LC CDR1), light chain complementary determining region 2 (LC CDR2), and light chain complementary determining region 3 (LC CDR3) of an EGFRvIII binding domain described herein, e.g., provided in Table 6, and/or one or more (e.g., all three) heavy chain complementary determining region 1 (HC CDR1), heavy chain complementary determining region 2 (HC CDR2), and heavy chain complementary determining region 3 (HC CDR3) of an EGFRvIII binding domain described herein, e.g., provided in Table 6.

[0371] In one embodiment, the EGFRvIII binding domain comprises a light chain variable region described herein (e.g., in Table 6) and/or a heavy chain variable region described herein (e.g., in Table 6). In one embodiment, the EGFRvIII binding domain is a scFv comprising a light chain and a heavy chain of an amino acid sequence listed in Table 6. In an embodiment, the EGFRvIII binding domain (e.g., an scFv) comprises: a light chain variable region comprising an amino acid sequence having at least one, two or three modifications (e.g., substitutions, e.g., conservative substitutions) but not more than 30, 20 or 10 modifications (e.g., substitutions, e.g., conservative substitutions) of an amino acid sequence of a light chain variable region provided in Table 6, or a sequence with 95-99% identity with an amino acid sequence provided in Table 6; and/or a heavy chain variable region comprising an amino acid sequence having at least one, two or three modifications (e.g., substitutions, e.g., conservative substitutions) but not more than 30, 20 or 10 modifications (e.g., substitutions, e.g., conservative substitutions) of an amino acid sequence of a heavy chain variable region provided in Table 6, or a sequence with 95-99% identity to an amino acid sequence provided in Table 6.

[0372] In one embodiment, the EGFRvIII binding domain comprises an amino acid sequence selected from any one of SEQ ID NOs: 344-352; or an amino acid sequence having at least one, two or three modifications (e.g., substitutions, e.g., conservative substitutions) but not more than 30, 20 or 10 modifications (e.g., substitutions, e.g., conservative substitutions) to any of the aforesaid sequences; or a sequence with 95-99% identity to any of the aforesaid sequences. In one embodiment, the EGFRvIII binding domain is a scFv, and a light chain variable region comprising an amino acid sequence described herein, e.g., in Table 6, is attached to a heavy chain variable region comprising an amino acid sequence described herein, e.g., in Table 6, via a linker, e.g., a linker described herein. In one embodiment, the EGFRvIII binding domain includes a (Gly4-Ser)n linker, wherein n is 1, 2, 3, 4, 5, or 6, preferably 4 (SEQ ID NO: 967). The light chain variable region and heavy chain variable region of a scFv can be, e.g., in any of the following orientations: light chain variable region-linker-heavy chain variable region or heavy chain variable region-linker-light chain variable region.

[0373] In one embodiment, the Claudin6 binding domain comprises one or more (e.g., all three) light chain complementary determining region 1 (LC CDR1), light chain complementary determining region 2 (LC CDR2), and light chain complementary determining region 3 (LC CDR3) of a Claudin6 binding domain described herein, e.g., provided in Table 6, and/or one or more (e.g., all three) heavy chain complementary determining region 1 (HC CDR1), heavy chain complementary determining region 2 (HC CDR2), and heavy chain complementary determining region 3 (HC CDR3) of a Claudin6 binding domain described herein, e.g., provided in Table 6.

[0374] In one embodiment, the Claudin-6 binding domain comprises a light chain variable region described herein (e.g., in Table 6) and/or a heavy chain variable region described herein (e.g., in Table 6). In one embodiment, the Claudin-6 binding domain is a scFv comprising a light chain and a heavy chain of an amino acid sequence listed in Table 6. In an embodiment, the Claudin-6 binding domain (e.g., an scFv) comprises: a light chain variable region comprising an amino acid sequence having at least one, two or three modifications (e.g., substitutions, e.g., conservative substitutions) but not more than 30, 20 or 10 modifications (e.g., substitutions, e.g., conservative substitutions) of an amino acid sequence of a light chain variable region provided in Table 6, or a sequence with 95-99% identity with an amino acid sequence provided in Table 6; and/or a heavy chain variable region comprising an amino acid sequence having at least one, two or three modifications (e.g., substitutions, e.g., conservative substitutions) but not more than 30, 20 or 10 modifications (e.g., substitutions, e.g., conservative substitutions) of an amino acid sequence of a heavy chain variable region provided in Table 6, or a sequence with 95-99% identity to an amino acid sequence provided in Table 6.

[0375] In one embodiment, the Claudin6 binding domain comprises an amino acid sequence selected from any one of SEQ ID NOs: 353-355; or an amino acid sequence having at least one, two or three modifications (e.g., substitutions, e.g., conservative substitutions) but not more than 30, 20 or 10 modifications (e.g., substitutions, e.g., conservative substitutions) to any of the aforesaid sequences; or a sequence with 95-99% identity to any of the aforesaid sequences. In one embodiment, the Claudin6 binding domain is a scFv, and a light chain variable region comprising an amino acid sequence described herein, e.g., in Table 6, is attached to a heavy chain variable region comprising an amino acid sequence described herein, e.g., in Table 6, via a linker, e.g., a linker described herein. In one embodiment, the Claudin6 binding domain includes a (Gly4-Ser)n linker, wherein n is 1, 2, 3, 4, 5, or 6, preferably 4 (SEQ ID NO: 967). The light chain variable region and heavy chain variable region of a scFv can be, e.g., in any of the following orientations: light chain variable region-linker-heavy chain variable region or heavy chain variable region-linker-light chain variable region.

[0376] In one embodiment, an antigen binding domain against GD2 is an antigen binding portion, e.g., CDRs, of an antibody described in, e.g., Mujoo et al., Cancer Res. 47(4):1098-1104 (1987); Cheung et al., Cancer Res 45(6):2642-2649 (1985), Cheung et al., J Clin Oncol 5(9):1430-1440 (1987), Cheung et al., J Clin Oncol 16(9):3053-3060 (1998), Handgretinger et al., Cancer Immunol Immunother 35(3):199-204 (1992). In some embodiments, an antigen binding domain against GD2 is an antigen binding portion of an antibody selected from mAb 14.18, 14G2a, ch14.18, hu14.18, 3F8, hu3F8, 3G6, 866, 60C3, 1068, ME36.1, and 8H9, see e.g., WO2012033885, WO2013040371, WO2013192294, WO2013061273, WO2013123061, WO2013074916, and WO201385552. In some embodiments, an antigen binding domain against GD2 is an antigen binding portion of an antibody described in US Publication No.: 20100150910 or PCT Publication No.: WO 2011160119.

[0377] In one embodiment, an antigen binding domain against the Tn antigen, the sTn antigen, a Tn-O-glycopeptide antigen, or a sTn-O-glycopeptide antigen is an antigen binding portion, e.g., CDRs, of an antibody described in, e.g., US 2014/0178365, U.S. Pat. No. 8,440,798, EP 2083868 A2, Brooks et al., PNAS 107(22):10056-10061 (2010), and Stone et al., Oncolmmunology 1(6):863-873 (2012).

[0378] In one embodiment, an antigen binding domain against PSMA is an antigen binding portion, e.g., CDRs, of an antibody described in, e.g., Parker et al., Protein Expr Purif 89(2):136-145 (2013), US 20110268656 (J591 ScFv); Frigerio et al, European J Cancer 49(9):2223-2232 (2013) (scFvD2B); WO 2006125481 (mAbs 3/A12, 3/E7 and 3/F11) and single chain antibody fragments (scFv A5 and D7).

[0379] In one embodiment, an antigen binding domain against CD97 is an antigen binding portion, e.g., CDRs, of an antibody described in, e.g., U.S. Pat. No. 6,846,911; de Groot et al., J Immunol 183(6):4127-4134 (2009); or an antibody from R&D:MAB3734.

[0380] In one embodiment, an antigen binding domain against TAG72 is an antigen binding portion, e.g., CDRs, of an antibody described in, e.g., Hombach et al., Gastroenterology 113(4):1163-1170 (1997); and Abcam ab691.

[0381] In one embodiment, an antigen binding domain against CD44v6 is an antigen binding portion, e.g., CDRs, of an antibody described in, e.g., Casucci et al., Blood 122(20):3461-3472 (2013).

[0382] In one embodiment, an antigen binding domain against CEA is an antigen binding portion, e.g., CDRs, of an antibody described in, e.g., Chmielewski et al., Gastoenterology 143(4):1095-1107 (2012).

[0383] In one embodiment, an antigen binding domain against EPCAM is an antigen binding portion, e.g., CDRS, of an antibody selected from MT110, EpCAM-CD3 bispecific Ab (see, e.g., clinicaltrials.gov/ct2/show/NCT00635596); Edrecolomab; 3622W94; ING-1; and adecatumumab (MT201).

[0384] In one embodiment, an antigen binding domain against KIT is an antigen binding portion, e.g., CDRs, of an antibody described in, e.g., U.S. Pat. No. 7,915,391, US20120288506, and several commercial catalog antibodies.

[0385] In one embodiment, an antigen binding domain against IL-13Ra2 is an antigen binding portion, e.g., CDRs, of an antibody described in, e.g., WO2008/146911, WO2004087758, several commercial catalog antibodies, and WO2004087758.

[0386] In one embodiment, an antigen binding domain against CD171 is an antigen binding portion, e.g., CDRs, of an antibody described in, e.g., Hong et al., J Immunother 37(2):93-104 (2014).

[0387] In one embodiment, an antigen binding domain against PSCA is an antigen binding portion, e.g., CDRs, of an antibody described in, e.g., Morgenroth et al., Prostate 67(10):1121-1131 (2007) (scFv 7F5); Nejatollahi et al., J of Oncology 2013 (2013), article ID 839831 (scFv C5-II); and US Pat Publication No. 20090311181.

[0388] In one embodiment, an antigen binding domain against MAD-CT-2 is an antigen binding portion, e.g., CDRs, of an antibody described in, e.g., PMID: 2450952; U.S. Pat. No. 7,635,753.

[0389] In one embodiment, an antigen binding domain against Folate receptor alpha is an antigen binding portion, e.g., CDRs, of the antibody IMGN853, or an antibody described in US20120009181; U.S. Pat. No. 4,851,332, LK26: U.S. Pat. No. 5,952,484.

[0390] In one embodiment, an antigen binding domain against ERBB2 (Her2/neu) is an antigen binding portion, e.g., CDRs, of the antibody trastuzumab, or pertuzumab.

[0391] In one embodiment, an antigen binding domain against MUC1 is an antigen binding portion, e.g., CDRs, of the antibody SAR566658.

[0392] In one embodiment, the antigen binding domain against EGFR is antigen binding portion, e.g., CDRs, of the antibody cetuximab, panitumumab, zalutumumab, nimotuzumab, or matuzumab.

[0393] In one embodiment, an antigen binding domain against NCAM is an antigen binding portion, e.g., CDRs, of the antibody clone 2-2B: MAB5324 (EMD Millipore)

[0394] In one embodiment, an antigen binding domain against CAIX is an antigen binding portion, e.g., CDRs, of the antibody clone 303123 (R&D Systems).

[0395] In one embodiment, an antigen binding domain against Fos-related antigen 1 is an antigen binding portion, e.g., CDRs, of the antibody 12F9 (Novus Biologicals).

[0396] In one embodiment, an antigen binding domain against SSEA-4 is an antigen binding portion, e.g., CDRs, of antibody MC813 (Cell Signaling), or other commercially available antibodies.

[0397] In one embodiment, an antigen binding domain against PDGFR-beta is an antigen binding portion, e.g., CDRs, of an antibody Abcam ab32570.

[0398] In one embodiment, an antigen binding domain against ALK is an antigen binding portion, e.g., CDRs, of an antibody described in, e.g., Mino-Kenudson et al., Clin Cancer Res 16(5):1561-1571 (2010).

[0399] In one embodiment, an antigen binding domain against plysialic acid is an antigen binding portion, e.g., CDRs, of an antibody described in, e.g., Nagae et al., J Biol Chem 288(47):33784-33796 (2013).

[0400] In one embodiment, an antigen binding domain against PLAC1 is an antigen binding portion, e.g., CDRs, of an antibody described in, e.g., Ghods et al., Biotechnol Appl Biochem 2013 doi:10.1002/bab.1177.

[0401] In one embodiment, an antigen binding domain against GloboH is an antigen binding portion of the antibody VK9; or an antibody described in, e.g., Kudryashov V et al, Glycoconj J. 15(3):243-9 (1998), Lou et al., Proc Natl Acad Sci USA 111(7):2482-2487 (2014); MBr1: Bremer E-G et al. J Biol Chem 259:14773-14777 (1984).

[0402] In one embodiment, an antigen binding domain against NY-BR-1 is an antigen binding portion, e.g., CDRs of an antibody described in, e.g., Jager et al., Appl Immunohistochem Mol Morphol 15(1):77-83 (2007).

[0403] In one embodiment, an antigen binding domain against sperm protein 17 is an antigen binding portion, e.g., CDRs, of an antibody described in, e.g., Song et al., Target Oncol 2013 Aug. 14 (PMID: 23943313); Song et al., Med Oncol 29(4):2923-2931 (2012).

[0404] In one embodiment, an antigen binding domain against TRP-2 is an antigen binding portion, e.g., CDRs, of an antibody described in, e.g., Wang et al, J Exp Med. 184(6):2207-16 (1996).

[0405] In one embodiment, an antigen binding domain against CYP1B1 is an antigen binding portion, e.g., CDRs, of an antibody described in, e.g., Maecker et al, Blood 102 (9): 3287-3294 (2003).

[0406] In one embodiment, an antigen binding domain against RAGE-1 is an antigen binding portion, e.g., CDRs, of the antibody MAB5328 (EMD Millipore).

[0407] In one embodiment, an antigen binding domain against human telomerase reverse transcriptase is an antigen binding portion, e.g., CDRs, of the antibody cat no: LS-B95-100 (Lifespan Biosciences)

[0408] In one embodiment, an antigen binding domain against intestinal carboxyl esterase is an antigen binding portion, e.g., CDRs, of the antibody 4F12: cat no: LS-B6190-50 (Lifespan Biosciences).

[0409] In one embodiment, an antigen binding domain against mut hsp70-2 is an antigen binding portion, e.g., CDRs, of the antibody Lifespan Biosciences: monoclonal: cat no: LS-C133261-100 (Lifespan Biosciences).

[0410] In one embodiment, an antigen binding domain against MAD-CT-2 is an antigen binding portion, e.g., CDRs, of an antibody described in, e.g., PMID: 2450952; U.S. Pat. No. 7,635,753.

[0411] In one embodiment, the antigen binding domain comprises one, two three (e.g., all three) heavy chain CDRs, HC CDR1, HC CDR2 and HC CDR3, from an antibody listed above, and/or one, two, three (e.g., all three) light chain CDRs, LC CDR1, LC CDR2 and LC CDR3, from an antibody listed above. In one embodiment, the antigen binding domain comprises a heavy chain variable region and/or a variable light chain region of an antibody listed above.

[0412] In some embodiments, the antigen binding domain of a CAR targets a tumor antigen that is an antigen expressed on a myeloid tumor (either a surface antigen or presented by MHC), and a cell comprising such a CAR recognizes a myeloid tumor antigen.

[0413] In an embodiment, the myeloid tumor antigen is an antigen that is preferentially or specifically expressed on the surface of a myeloid tumor cell.

[0414] In one embodiment, the antigen-binding domain of a CAR can be chosen such that a myeloid tumor population is targeted. Alternatively, when targeting of more than one type of myeloid tumor is desired, an antigen binding domain that targets a myeloid tumor antigen that is expressed by more than one, e.g., all, of the myeloid tumors to be targeted can be selected.

[0415] A CAR can target the following additional tumor antigens: CD123, CD34, Flt3, CD33 and CLL-1. In embodiments, the tumor antigen is selected from CD123, CD33 and CLL-1. In some embodiments, the tumor antigen is CD123. In some embodiments, the tumor antigen is CD33. In some embodiments, the tumor antigen is CD34. In some embodiments, the tumor antigen is Flt3. In embodiments, the tumor antigen is CLL-1. In embodiments, the antigen binding domain targets the human antigen.

[0416] In one aspect, the antigen-binding domain of a CAR binds to CD123, e.g., human CD123. Any known CD123 binding domain may be used in the invention. In one embodiment, an antigen binding domain against CD123 is an antigen binding portion, e.g., CDRs or VH and VL, of an antibody, antigen-binding fragment or CAR described in, e.g., PCT publication WO2014/130635. In one embodiment, an antigen binding domain against CD123 is an antigen binding portion, e.g., CDRs or VH and VL, of an antibody, antigen-binding fragment or CAR described in, e.g., PCT publication WO/2016/028896. In one embodiment, an antigen binding domain against CD123 is an antigen binding portion, e.g., CDRs, of an antibody, antigen-binding fragment, or CAR described in, e.g., PCT publication WO1997/024373, WO2008/127735 (e.g., a CD123 binding domain of 26292, 32701, 37716 or 32703), WO2014/138805 (e.g., a CD123 binding domain of CSL362), WO2014/138819, WO2013/173820, WO2014/144622, WO2001/66139, WO2010/126066 (e.g., the CD123 binding domain of any of Old4, Old5, Old17, Old19, New102, or Old6), WO2014/144622, WO2016/028896, or US2009/0252742. In embodiments, the antigen binding domain is or is derived from a murine anti-human CD123 binding domain. In embodiments, the antigen binding domain is a humanized antibody or antibody fragment, e.g., scFv domain. In an embodiment, the antigen binding domain is a human antibody or antibody fragment that binds to human CD123. In embodiments, the antigen binding domain is an scFv domain which includes a light chain variable region (VL) and a heavy chain variable region (VH). The VL and VH may attached by a linker described herein, e.g., comprising the sequence GGGGSGGGGSGGGGS (SEQ ID NO: 30), and may be in any orientation, e.g., VL-linker-VH, or VH-linker-VL.

[0417] In some embodiments, the antigen binding domain that binds to CD123 is a scFv domain. In some embodiments, the antigen binding domain that binds to CD123 is a murine scFv domain. In an embodiment, the antigen binding domain that binds to CD123 is a human or humanized scFv domain. Exemplary scFv domains (and their sequences) that bind to CLDN6 are provided in Table 19. The scFv domain sequences provided in Table 19 include a light chain variable region (VL) and a heavy chain variable region (VH). The VL and VH are attached by a linker comprising the sequence GGGGSGGGGSGGGGSGGGGS (SEQ ID NO: 29), e.g., in the following orientation: VL-linker-VH. In one embodiment, the CD123 binding domain comprises an amino acid sequence selected from any one of SEQ ID NOs: 751, 756, 761, or 766; or an amino acid sequence having at least one, two or three modifications (e.g., substitutions, e.g., conservative substitutions) but not more than 30, 20 or 10 modifications (e.g., substitutions, e.g., conservative substitutions) to any of the aforesaid sequences; or a sequence with 95-99% identity to an amino acid sequence selected from any one of SEQ ID NOs: 751, 756, 761, or 766.

[0418] In one aspect, the antigen-binding domain of a CAR binds to CD33, e.g., human CD33. Any known CD33 binding domain may be used in the invention. In one embodiment, an antigen binding domain against CD33 is an antigen binding portion, e.g., CDRs or VH and VL, of an antibody, antigen-binding fragment or CAR described in, e.g., PCT publication WO2016/014576 or US Patent Publication 2016-0096892-A1, the contents of which are incorporated herein in their entirety. In one embodiment, an antigen binding domain against CD33 is an antigen binding portion of or derived from Gemtuzumab ozogamicin (e.g., comprising an antigen binding domain comprising one or more, e.g., one, two, or three, CDRs of the heavy chain variable domain and/or one or more, e.g., one, two, or three, CDRs of the light chain variable domain, or the VH or VL, or the scFv sequence, of the scFv sequence of Gemtuzumab ozogamicin) (previously marketed as Mylotarg), e.g., Bross et al., Clin Cancer Res 7(6):1490-1496 (2001) (Gemtuzumab Ozogamicin, hP67.6). In one embodiment, an antigen binding domain against CD33 is an antigen binding portion of or derived from (e.g., comprising an antigen binding domain comprising one or more, e.g., one, two, or three, CDRs of the heavy chain variable domain and/or one or more, e.g., one, two, or three, CDRs of the light chain variable domain, or the VH or VL, or the scFv sequence) of the scFv sequence encoded by GenBank reference no. AM402974.1 (See, Wang et al., Mol. Ther., vol. 23:1, pp. 184-191 (2015), hereby incorporated by reference. In one embodiment, an antigen binding domain against CD33 is an antigen binding portion, e.g., CDRs, of an antibody described in—e.g., Caron et al., Cancer Res 52(24):6761-6767 (1992) (Lintuzumab, HuM195), Lapusan et al., Invest New Drugs 30(3):1121-1131 (2012) (AVE9633), Aigner et al., Leukemia 27(5): 1107-1115 (2013) (AMG330, CD33 BiTE), Dutour et al., Adv hematol 2012:683065 (2012), and Pizzitola et al., Leukemia doi:10.1038/Lue.2014.62 (2014). In embodiments, the antigen binding domain is or is derived from a murine anti-human CD33 binding domain. In embodiments, the antigen binding domain is a humanized antibody or antibody fragment, e.g., scFv domain. In an embodiment, the antigen binding domain is a human antibody or antibody fragment that binds to human CD33. In embodiments, the antigen binding domain is an scFv domain which includes a light chain variable region (VL) and a heavy chain variable region (VH). The VL and VH may attached by a linker described herein, e.g., comprising the sequence GGGGSGGGGSGGGGS (SEQ ID NO: 30), and may be in any orientation, e.g., VL-linker-VH, or VH-linker-VL.

[0419] In one aspect, the antigen-binding domain of a CAR binds to CLL-1, e.g., human CLL-1. Any known CLL-1 binding domain may be used in the invention. In one embodiment, an antigen binding domain against CLL-1 is an antigen binding portion, e.g., CDRs or VH and VL, of an antibody, antigen-binding fragment or CAR described in, e.g., PCT publication WO2016/014535 or US Patent Publication 2016-0051651-A1, the contents of which are incorporated herein in their entirety. In one embodiment, an antigen binding domain against CLL-1 is an antigen binding portion, e.g., CDRs, of an antibody available from R&D, ebiosciences, Abcam, for example, PE-CLL1-hu Cat #353604 (BioLegend); and PE-CLL1 (CLEC12A) Cat #562566 (BD). In embodiments, the antigen binding domain is or is derived from a murine anti-human CLL-1 binding domain. In embodiments, the antigen binding domain is a humanized antibody or antibody fragment, e.g., scFv domain. In an embodiment, the antigen binding domain is a human antibody or antibody fragment that binds to human CLL-1. In embodiments, the antigen binding domain is an scFv domain which includes a light chain variable region (VL) and a heavy chain variable region (VH). The VL and VH may attached by a linker described herein, e.g., comprising the sequence GGGGSGGGGSGGGGS (SEQ ID NO: 30), and may be in any orientation, e.g., VL-linker-VH, or VH-linker-VL.

[0420] In some embodiments, the antigen binding domain of a CAR targets a B-Cell antigen. In an embodiment, the B cell antigen is an antigen that is preferentially or specifically expressed on the surface of the B cell. The antigen can be expressed on the surface of any one of the following types of B cells: progenitor B cells (e.g., pre-B cells or pro-B cells), early pro-B cells, late pro-B cells, large pre-B cells, small pre-B cells, immature B cells, e.g., naïve B cells, mature B cells, plasma B cells, plasmablasts, memory B cells, B-1 cells, B-2 cells, marginal-zone B cells, follicular B cells, germinal center B cells, or regulatory B cells (Bregs).

[0421] The present disclosure provides CARs that can target the following antigens: CD19; CD123; CD22; CD30; CD171; CS-1; C-type lectin-like molecule-1, CD33; epidermal growth factor receptor variant III (EGFRvIII); ganglioside G2 (GD2); ganglioside GD3; TNF receptor family member B cell maturation (BCMA); Tn antigen ((Tn Ag) or (GalNAcα-Ser/Thr)); prostate-specific membrane antigen (PSMA); Receptor tyrosine kinase-like orphan receptor 1 (ROR1); Fms-Like Tyrosine Kinase 3 (FLT3); Tumor-associated glycoprotein 72 (TAG72); CD38; CD44v6; Carcinoembryonic antigen (CEA); Epithelial cell adhesion molecule (EPCAM); B7H3 (CD276); KIT (CD117); Interleukin-13 receptor subunit alpha-2; Mesothelin; Interleukin 11 receptor alpha (IL-11Ra); prostate stem cell antigen (PSCA); Protease Serine 21; vascular endothelial growth factor receptor 2 (VEGFR2); Lewis(Y) antigen; CD24; Platelet-derived growth factor receptor beta (PDGFR-beta); Stage-specific embryonic antigen-4 (SSEA-4); CD20; Folate receptor alpha; Receptor tyrosine-protein kinase ERBB2 (Her2/neu); Mucin 1, cell surface associated (MUC1); epidermal growth factor receptor (EGFR); neural cell adhesion molecule (NCAM); Prostase; prostatic acid phosphatase (PAP); elongation factor 2 mutated (ELF2M); Ephrin B2; fibroblast activation protein alpha (FAP); insulin-like growth factor 1 receptor (IGF-I receptor), carbonic anhydrase IX (CAIX); Proteasome (Prosome, Macropain) Subunit, Beta Type, 9 (LMP2); glycoprotein 100 (gp100); oncogene fusion protein consisting of breakpoint cluster region (BCR) and Abelson murine leukemia viral oncogene homolog 1 (Abl) (bcr-abl); tyrosinase; ephrin type-A receptor 2 (EphA2); Fucosyl GM1; sialyl Lewis adhesion molecule (sLe); ganglioside GM3; transglutaminase 5 (TGS5); high molecular weight-melanoma-associated antigen (HMWMAA); o-acetyl-G D2 ganglioside (OAcGD2); Folate receptor beta; tumor endothelial marker 1 (TEM1/CD248); tumor endothelial marker 7-related (TEM7R); claudin 6 (CLDN6); thyroid stimulating hormone receptor (TSHR); G protein-coupled receptor class C group 5, member D (GPRC5D); chromosome X open reading frame 61 (CXORF61); CD97; CD179a; anaplastic lymphoma kinase (ALK); Polysialic acid; placenta-specific 1 (PLAC1); hexasaccharide portion of globoH glycoceramide (GloboH); mammary gland differentiation antigen (NY-BR-1); uroplakin 2 (UPK2); Hepatitis A virus cellular receptor 1 (HAVCR1); adrenoceptor beta 3 (ADRB3); pannexin 3 (PANX3); G protein-coupled receptor 20 (GPR20); lymphocyte antigen 6 complex, locus K 9 (LY6K); Olfactory receptor 51E2 (OR51E2); TCR Gamma Alternate Reading Frame Protein (TARP); Wilms tumor protein (WT1); Cancer/testis antigen 1 (NY-ESO-1); Cancer/testis antigen 2 (LAGE-1a); Melanoma-associated antigen 1 (MAGE-A1); ETS translocation-variant gene 6, located on chromosome 12p (ETV6-AML); sperm protein 17 (SPA17); X Antigen Family, Member 1A (XAGE1); angiopoietin-binding cell surface receptor 2 (Tie 2); melanoma cancer testis antigen-1 (MAD-CT-1); melanoma cancer testis antigen-2 (MAD-CT-2); Fos-related antigen 1; tumor protein p53 (p53); p53 mutant; prostein; surviving; telomerase; prostate carcinoma tumor antigen-1, melanoma antigen recognized by T cells 1; Rat sarcoma (Ras) mutant; human Telomerase reverse transcriptase (hTERT); sarcoma translocation breakpoints; melanoma inhibitor of apoptosis (ML-IAP); ERG (transmembrane protease, serine 2 (TMPRSS2) ETS fusion gene); N-Acetyl glucosaminyl-transferase V (NA17); paired box protein Pax-3 (PAX3); Androgen receptor; Cyclin B1; v-myc avian myelocytomatosis viral oncogene neuroblastoma derived homolog (MYCN); Ras Homolog Family Member C (RhoC); Tyrosinase-related protein 2 (TRP-2); Cytochrome P450 1B1 (CYP1B1); CCCTC-Binding Factor (Zinc Finger Protein)-Like, Squamous Cell Carcinoma Antigen Recognized By T Cells 3 (SART3); Paired box protein Pax-5 (PAX5); proacrosin binding protein sp32 (OY-TES1); lymphocyte-specific protein tyrosine kinase (LCK); A kinase anchor protein 4 (AKAP-4); synovial sarcoma, X breakpoint 2 (SSX2); Receptor for Advanced Glycation Endproducts (RAGE-1); renal ubiquitous 1 (RU1); renal ubiquitous 2 (RU2); legumain; human papilloma virus E6 (HPV E6); human papilloma virus E7 (HPV E7); intestinal carboxyl esterase; heat shock protein 70-2 mutated (mut hsp70-2); CD79a; CD79b; CD72; Leukocyte-associated immunoglobulin-like receptor 1 (LAIR1); Fc fragment of IgA receptor (FCAR or CD89); Leukocyte immunoglobulin-like receptor subfamily A member 2 (LILRA2); CD300 molecule-like family member f (CD300LF); C-type lectin domain family 12 member A (CLEC12A); bone marrow stromal cell antigen 2 (BST2); EGF-like module-containing mucin-like hormone receptor-like 2 (EMR2); lymphocyte antigen 75 (LY75); Glypican-3 (GPC3); Fc receptor-like 5 (FCRL5); immunoglobulin lambda-like polypeptide 1 (IGLL1); TNF receptor family member; Fms-Like Tyrosine Kinase 3 (FL T3); CD10, CD19, CD20, CD21, CD22, CD23, CD24, CD25, CD37, CD38, CD53, CD72, CD73, CD74, CD75, CD77, CD79a, CD79b, CD80, CD81, CD82, CD83, CD84, CD85, ROR1, BCMA, CD86, and CD179b. Other B cell antigens that can be targeted by a CAR described herein include: CD1a, CD1b, CD1c, CD1d, CD2, CD5, CD6, CD9, CD11a, CD11 b, CD11c, CD17, CD18, CD26, CD27, CD29, CD30, CD31, CD32a, CD32b, CD35, CD38, CD39, CD40, CD44, CD45, CD45RA, CD45RB, CD45RC, CD45RO, CD46, CD47, CD48, CD49b, CD49c, CD49d, CD50, CD52, CD54, CD55, CD58, CD60a, CD62L, CD63, CD63, CD68 CD69, CD70, CD85E, CD85I, CD85J, CD92, CD95, CD97, CD98, CD99, CD100, CD102, CD108, CD119, CD120a, CD120b, CD121b, CD122, CD124, CD125, CD126, CD130, CD132, CD137, CD138, CD139, CD147, CD148, CD150, CD152, CD162, CD164, CD166, CD167a, CD170, CD175, CD175s, CD180, CD184, CD185, CD192, CD196, CD197, CD200, CD205, CD210a, CDw210b, CD212, CD213a1, CD213a2, CD215, CD217, CD218a, CD218b, CD220, CD221, CD224, CD225, CD226, CD227, CD229, CD230, CD232, CD252, CD253, CD257, CD258, CD261, CD262, CD263, CD264, CD267, CD268, CD269, CD270, CD272, CD274, CD275, CD277, CD279, CD283, CD289, CD290, CD295, CD298, CD300a, CD300c, CD305, CD306, CD307a, CD307b, CD307c, CD307d, CD307e, CD314, CD315, CD316, CD317, CD319, CD321, CD327, CD328, CD329, CD338, CD351, CD352, CD353, CD354, CD355, CD357, CD358, CD360, CD361, CD362, and CD363.

[0422] In another embodiment, the antigen targeted by the CAR is chosen from CD19, BCMA, CD20, CD22, FcRn5, FcRn2, CS-1 and CD138. In an embodiment, the antigen targeted by the CAR is CD19. In an embodiment, the antigen targeted by the CAR is CD20. In an embodiment, the antigen targeted by the CAR is CD22. In an embodiment, the antigen targeted by the CAR is BCMA. In an embodiment, the antigen targeted by the CAR is FcRn5. In an embodiment, the antigen targeted by the CAR is FcRn2. In an embodiment, the antigen targeted by the CAR is CS-1. In an embodiment, the antigen targeted by the CAR is CD138.

[0423] In one embodiment, the antigen-binding domain of a CAR, e.g., the CAR expressed by a cell of the invention (e.g., a cell that also expresses a CAR), can be chosen such that a preferred B cell population is targeted. For example, in an embodiment where targeting of B regulatory cells is desired, an antigen binding domain is selected that targets an antigen that is expressed on regulatory B cells and not on other B cell populations, e.g., plasma B cells and memory B cells. Cell surface markers expressed on regulatory B cells include: CD19, CD24, CD25, CD38, or CD86, or markers described in He et al., 2014, J Immunology Research, Article ID 215471. When targeting of more than one type of B cells is desired, an antigen binding domain that targets an antigen that is expressed by all of the B cells to be targeted can be selected.

[0424] In an embodiment, the antigen-binding domain of a CAR, e.g., the CAR expressed by a cell of the invention, binds to CD19. CD19 is found on B cells throughout differentiation of the lineage from the pro/pre-B cell stage through the terminally differentiated plasma cell stage. In an embodiment, the antigen binding domain is a murine scFv domain that binds to human CD19, e.g., CTL019 (e.g., SEQ ID NO: 356). In an embodiment, the antigen binding domain is a humanized antibody or antibody fragment, e.g., scFv domain, derived from the murine CTL019 scFv. In an embodiment, the antigen binding domain is a human antibody or antibody fragment that binds to human CD19. Exemplary scFv domains (and their sequences, e.g., CDRs, VL and VH sequences) that bind to CD19 are provided in Table 7 and Table 15A. The scFv domain sequences provided in Table 7 include a light chain variable region (VL) and a heavy chain variable region (VH). The VL and VH are attached by a linker comprising the sequence GGGGSGGGGSGGGGS (SEQ ID NO: 30), e.g., in the following orientation: VL-linker-VH.

TABLE 7
Antigen Binding domains that bind CD19

| | | | SEQ |
|---|---|---|---|
| | | | ID |
| Antigen | Name | Amino Acid Sequence | NO: |
| CD19 | muCTL019 | DIQMTQTTSSLSASLGDRVTISCRASQDISKYLNWYQQKPDGTVKLLI | 356 |
| | | YHTSRLHSGVPSRFSGSGSGTDYSLTISNLEQEDIATYFCQQGNTLP | |
| | | YTFGGGTKLEITGGGGSGGGGSGGGGSEVKLQESGPGLVAPSQSLS | |
| | | VTCTVSGVSLPDYGVSWIRQPPRKGLEWLGVIWGSETTYYNSALKSR | |
| | | LTIIKDNSKSQVFLKMNSLQTDDTAIYYCAKHYYYGGSYAMDYWGQG | |
| | | TSVTVSS | |
| CD19 | huscFv1 | EIVMTQSPATLSLSPGERATLSCRASQDISKYLNWYQQKPGQAPRLLI | 357 |
| | | YHTSRLHSGIPARFSGSGSGTDYTLTISSLQPEDFAVYFCQQGNTLPY | |
| | | TFGQGTKLEIKGGGGSGGGGSGGGGSQVQLQESGPGLVKPSETLSL | |
| | | TCTVSGVSLPDYGVSWIRQPPGKGLEWIGVIWGSETTYYSSSLKSRV | |
| | | TISKDNSKNQVSLKLSSVTAADTAVYYCAKHYYYGGSYAMDYWGQG | |
| | | TLVTVSS | |
| CD19 | huscFv2 | EIVMTQSPATLSLSPGERATLSCRASQDISKYLNWYQQKPGQAPRLLI | 358 |
| | | YHTSRLHSGIPARFSGSGSGTDYTLTISSLQPEDFAVYFCQQGNTLPY | |
| | | TFGQGTKLEIKGGGGSGGGGSGGGGSQVQLQESGPGLVKPSETLSL | |
| | | TCTVSGVSLPDYGVSWIRQPPGKGLEWIGVIWGSETTYYQSSLKSRV | |
| | | TISKDNSKNQVSLKLSSVTAADTAVYYCAKHYYYGGSYAMDYWGQG | |
| | | TLVTVSS | |
| CD19 | huscFv3 | QVQLQESGPGLVKPSETLSLTCTVSGVSLPDYGVSWIRQPPGKGLE | 359 |
| | | WIGVIWGSETTYYSSSLKSRVTISKDNSKNQVSLKLSSVTAADTAVYY | |
| | | CAKHYYYGGSYAMDYWGQGTLVTVSSGGGGSGGGGSGGGGSEIV | |
| | | MTQSPATLSLSPGERATLSCRASQDISKYLNWYQQKPGQAPRLLIYH | |
| | | TSRLHSGIPARFSGSGSGTDYTLTISSLQPEDFAVYFCQQGNTLPYTF | |
| | | GQGTKLEIK | |
| CD19 | huscFv4 | QVQLQESGPGLVKPSETLSLTCTVSGVSLPDYGVSWIRQPPGKGLE | 360 |
| | | WIGVIWGSETTYYQSSLKSRVTISKDNSKNQVSLKLSSVTAADTAVYY | |
| | | CAKHYYYGGSYAMDYWGQGTLVTVSSGGGGSGGGGSGGGGSEIV | |
| | | MTQSPATLSLSPGERATLSCRASQDISKYLNWYQQKPGQAPRLLIYH | |
| | | TSRLHSGIPARFSGSGSGTDYTLTISSLQPEDFAVYFCQQGNTLPYTF | |
| | | GQGTKLEIK | |
| CD19 | huscFv5 | EIVMTQSPATLSLSPGERATLSCRASQDISKYLNWYQQKPGQAPRLLI | 361 |
| | | YHTSRLHSGIPARFSGSGSGTDYTLTISSLQPEDFAVYFCQQGNTLPY | |
| | | TFGQGTKLEIKGGGGSGGGGSGGGGSGGGGSQVQLQESGPGLVK | |
| | | PSETLSLTCTVSGVSLPDYGVSWIRQPPGKGLEWIGVIWGSETTYYS | |
| | | SSLKSRVTISKDNSKNQVSLKLSSVTAADTAVYYCAKHYYYGGSYAM | |
| | | DYWGQGTLVTVSS | |
| CD19 | huscFv6 | EIVMTQSPATLSLSPGERATLSCRASQDISKYLNWYQQKPGQAPRLLI | 362 |
| | | YHTSRLHSGIPARFSGSGSGTDYTLTISSLQPEDFAVYFCQQGNTLPY | |
| | | TFGQGTKLEIKGGGGSGGGGSGGGGSGGGGSQVQLQESGPGLVK | |
| | | PSETLSLTCTVSGVSLPDYGVSWIRQPPGKGLEWIGVIWGSETTYYQ | |
| | | SSLKSRVTISKDNSKNQVSLKLSSVTAADTAVYYCAKHYYYGGSYAM | |
| | | DYWGQGTLVTVSS | |
| CD19 | huscFv7 | QVQLQESGPGLVKPSETLSLTCTVSGVSLPDYGVSWIRQPPGKGLE | 363 |
| | | WIGVIWGSETTYYSSSLKSRVTISKDNSKNQVSLKLSSVTAADTAVYY | |
| | | CAKHYYYGGSYAMDYWGQGTLVTVSSGGGGSGGGGSGGGGSGG | |
| | | GGSEIVMTQSPATLSLSPGERATLSCRASQDISKYLNWYQQKPGQAP | |
| | | RLLIYHTSRLHSGIPARFSGSGSGTDYTLTISSLQPEDFAVYFCQQGN | |
| | | TLPYTFGQGTKLEIK | |
| CD19 | huscFv8 | QVQLQESGPGLVKPSETLSLTCTVSGVSLPDYGVSWIRQPPGKGLE | 364 |
| | | WIGVIWGSETTYYQSSLKSRVTISKDNSKNQVSLKLSSVTAADTAVYY | |
| | | CAKHYYYGGSYAMDYWGQGTLVTVSSGGGGSGGGGSGGGGSGG | |
| | | GGSEIVMTQSPATLSLSPGERATLSCRASQDISKYLNWYQQKPGQAP | |
| | | RLLIYHTSRLHSGIPARFSGSGSGTDYTLTISSLQPEDFAVYFCQQGN | |
| | | TLPYTFGQGTKLEIK | |
| CD19 | huscFv9 | EIVMTQSPATLSLSPGERATLSCRASQDISKYLNWYQQKPGQAPRLLI | 365 |
| | | YHTSRLHSGIPARFSGSGSGTDYTLTISSLQPEDFAVYFCQQGNTLPY | |
| | | TFGQGTKLEIKGGGGSGGGGSGGGGSGGGGSQVQLQESGPGLVK | |
| | | PSETLSLTCTVSGVSLPDYGVSWIRQPPGKGLEWIGVIWGSETTYYN | |
| | | SSLKSRVTISKDNSKNQVSLKLSSVTAADTAVYYCAKHYYYGGSYAM | |
| | | DYWGQGTLVTVSS | |
| CD19 | Hu | QVQLQESGPGLVKPSETLSLTCTVSGVSLPDYGVSWIRQPPGKGLE | 366 |
| | scFv10 | WIGVIWGSETTYYNSSLKSRVTISKDNSKNQVSLKLSSVTAADTAVYY | |
| | | CAKHYYYGGSYAMDYWGQGTLVTVSSGGGGSGGGGSGGGGSGG | |
| | | GGSEIVMTQSPATLSLSPGERATLSCRASQDISKYLNWYQQKPGQAP | |
| | | RLLIYHTSRLHSGIPARFSGSGSGTDYTLTISSLQPEDFAVYFCQQGN | |
| | | TLPYTFGQGTKLEIK | |
| CD19 | Hu | EIVMTQSPATLSLSPGERATLSCRASQDISKYLNWYQQKPGQAPRLLI | 367 |
| | scFv11 | YHTSRLHSGIPARFSGSGSGTDYTLTISSLQPEDFAVYFCQQGNTLPY | |
| | | TFGQGTKLEIKGGGGSGGGGSGGGGSQVQLQESGPGLVKPSETLSL | |
| | | TCTVSGVSLPDYGVSWIRQPPGKGLEWIGVIWGSETTYYNSSLKSRV | |
| | | TISKDNSKNQVSLKLSSVTAADTAVYYCAKHYYYGGSYAMDYWGQG | |
| | | TLVTVSS | |
| CD19 | Hu | QVQLQESGPGLVKPSETLSLTCTVSGVSLPDYGVSWIRQPPGKGLE | 368 |
| | scFv12 | WIGVIWGSETTYYNSSLKSRVTISKDNSKNQVSLKLSSVTAADTAVYY | |
| | | CAKHYYYGGSYAMDYWGQGTLVTVSSGGGGSGGGGSGGGGSEIV | |
| | | MTQSPATLSLSPGERATLSCRASQDISKYLNWYQQKPGQAPRLLIYH | |
| | | TSRLHSGIPARFSGSGSGTDYTLTISSLQPEDFAVYFCQQGNTLPYTF | |
| | | GQGTKLEIK | |

[0425] The CDR sequences of the scFv domains of the CD19 antigen binding domains provided in Table 7 are shown in Tables 8 and 15B for the heavy chain variable domains and in Tables 9 and 15C for the light chain variable domains. “ID” stands for the respective SEQ ID NO for each CDR.

TABLE 8
Heavy Chain Variable Domain CDRs

| | | | SEQ | | SEQ | | SEQ |
|---|---|---|---|---|---|---|---|
| | | | ID | | ID | | ID |
| Description | FW | HCDR1 | NO | HCDR2 | NO | HCDR3 | NO |
| murine_CART19 | | GVSLPDYGVS | 369 | VIWGSETTYYNSALKS | 370 | HYYYGGSYAMDY | 371 |
| humanized_CART19 a | VH4 | GVSLPDYGVS | 369 | VIWGSETTYY [symbol] S [symbol] LKS | 372 | HYYYGGSYAMDY | 371 |
| humanized_CART19 b | VH4 | GVSLPDYGVS | 369 | VIWGSETTYY [symbol] S [symbol] LKS | 373 | HYYYGGSYAMDY | 371 |
| humanized_CART19 c | VH4 | GVSLPDYGVS | 369 | VIWGSETTYYNS [symbol] LKS | 374 | HYYYGGSYAMDY | 371 |

TABLE 9
Light Chain Variable Domain CDRs

| | | | SEQ | | SEQ | | SEQ |
|---|---|---|---|---|---|---|---|
| | | | ID | | ID | | ID |
| Description | FW | LCDR1 | NO | LCDR2 | NO | LCDR3 | NO |
| murine_CART19 | | RASQDISKYLN | 375 | HTSRLHS | 376 | QQGNTLPYT | 377 |
| humanized_CART19 a | VK3 | RASQDISKYLN | 375 | HTSRLHS | 376 | QQGNTLPYT | 377 |
| humanized_CART19 b | VK3 | RASQDISKYLN | 375 | HTSRLHS | 376 | QQGNTLPYT | 377 |
| humanized_CART19 c | VK3 | RASQDISKYLN | 375 | HTSRLHS | 376 | QQGNTLPYT | 377 |

[0426] In an embodiment, the antigen binding domain comprises an anti-CD19 antibody, or fragment thereof, e.g., an scFv. For example, the antigen binding domain comprises a variable heavy chain and a variable light chain listed in Table 10. The linker sequence joining the variable heavy and variable light chains can be any of the linker sequences described herein, or alternatively, can be GSTSGSGKPGSGEGSTKG (SEQ ID NO: 378). The light chain variable region and heavy chain variable region of a scFv can be, e.g., in any of the following orientations: light chain variable region-linker-heavy chain variable region or heavy chain variable region-linker-light chain variable region.

TABLE 10
Additional Anti-CD19 antibody binding domains

| Ab Name | VH Sequence | VL Sequence |
|---|---|---|
| SJ25-C1 | QVQLLESGAELVRPGSSVKISCKASG | ELVLTQSPKFMSTSVGDRVSVTCKASQN |
| | YAFSSYWMNWVKQRPGQGLEWIGQI | VGTNVAWYQQKPGQSPKPLIYSATYRNS |
| | YPGDGDTNYNGKFKGQATLTADKSS | GVPDRFTGSGSGTDFTLTITNVQSKDLA |
| | STAYMQLSGLTSEDSAVYSCARKTISS | DYFYFCQYNRYPYTSGGGTKLEIKRRS |
| | VVDFYFDYWGQGTTVT (SEQ ID NO: | (SEQ ID NO: 380) |
| | 379) | |

| | ScFv Sequence |
|---|---|
| SJ25-C1 | QVQLLESGAELVRPGSSVKISCKASGYAFSSYWMNWVKQRPGQGLEWIGQIYPGD |
| scFv | GDTNYNGKFKGQATLTADKSSSTAYMQLSGLTSEDSAVYSCARKTISSVVDFYFDY |
| | WGQGTTVTGSTSGSGKPGSGEGSTKGELVLTQSPKFMSTSVGDRVSVTCKASQNV |
| | GTNVAWYQQKPGQSPKPLIYSATYRNSGVPDRFTGSGSGTDFTLTITNVQSKDLAD |
| | YFYFCQYNRYPYTSGGGTKLEIKRRS (SEQ ID NO: 381) |

[0427] In one embodiment, the CD19 binding domain comprises one or more (e.g., all three) light chain complementary determining region 1 (LC CDR1), light chain complementary determining region 2 (LC CDR2), and light chain complementary determining region 3 (LC CDR3) of a CD19 binding domain described herein, e.g., provided in Table 7 or 9, and/or one or more (e.g., all three) heavy chain complementary determining region 1 (HC CDR1), heavy chain complementary determining region 2 (HC CDR2), and heavy chain complementary determining region 3 (HC CDR3) of a CD19 binding domain described herein, e.g., provided in Table 7 or 8. In one embodiment, the CD19 binding domain comprises one, two, or all of LC CDR1, LC CDR2, and LC CDR3 of any amino acid sequences as provided in Table 9, incorporated herein by reference; and one, two or all of HC CDR1, HC CDR2, and HC CDR3 of any amino acid sequences as provided in Table 8.

[0428] In one embodiment, the CD19 binding domain comprises a light chain variable region described herein (e.g., in Table 7 or 10) and/or a heavy chain variable region described herein (e.g., in Table 7 or 10). In one embodiment, the CD19 binding domain is a scFv comprising a light chain and a heavy chain of an amino acid sequence listed in Table 7 or 10. In an embodiment, the CD19 binding domain (e.g., an scFv) comprises: a light chain variable region comprising an amino acid sequence having at least one, two or three modifications (e.g., substitutions, e.g., conservative substitutions) but not more than 30, 20 or 10 modifications (e.g., substitutions, e.g., conservative substitutions) of an amino acid sequence of a light chain variable region provided in Table 7 or 10, or a sequence with 95-99% identity with an amino acid sequence provided in Table 7 or 10; and/or a heavy chain variable region comprising an amino acid sequence having at least one, two or three modifications (e.g., substitutions, e.g., conservative substitutions) but not more than 30, 20 or 10 modifications (e.g., substitutions, e.g., conservative substitutions) of an amino acid sequence of a heavy chain variable region provided in Table 7 or 10, or a sequence with 95-99% identity to an amino acid sequence provided in Table 7 or 10.

[0429] In one embodiment, the CD19 binding domain comprises an amino acid sequence selected from any one of SEQ ID NOs: 356-368 and 381; or an amino acid sequence having at least one, two or three modifications (e.g., substitutions, e.g., conservative substitutions) but not more than 30, 20 or 10 modifications (e.g., substitutions, e.g., conservative substitutions) to any of the aforesaid sequences; or a sequence with 95-99% identity to any of the aforesaid sequences. In one embodiment, the CD19 binding domain is a scFv, and a light chain variable region comprising an amino acid sequence described herein, e.g., in Table 7 or 10, is attached to a heavy chain variable region comprising an amino acid sequence described herein, e.g., in Table 7 or 10, via a linker, e.g., a linker described herein. In one embodiment, the CD19 binding domain includes a (Gly4-Ser)n linker, wherein n is 1, 2, 3, 4, 5, or 6, preferably 4 (SEQ ID NO: 967). The light chain variable region and heavy chain variable region of a scFv can be, e.g., in any of the following orientations: light chain variable region-linker-heavy chain variable region or heavy chain variable region-linker-light chain variable region.

[0430] Any known CAR, e.g., the CD19 antigen binding domain of any known CAR, in the art can be used in accordance with the instant invention to construct a CAR. For example, LG-740; CAR described in the U.S. Pat. Nos. 8,399,645; 7,446,190; Xu et al., Leuk Lymphoma. 2013 54(2):255-260 (2012); Cruz et al., Blood 122(17):2965-2973 (2013); Brentjens et al., Blood, 118(18):4817-4828 (2011); Kochenderfer et al., Blood 116(20):4099-102 (2010); Kochenderfer et al., Blood 122 (25):4129-39 (2013); and 16th Annu Meet Am Soc Gen Cell Ther (ASGCT) (May 15-18, Salt Lake City) 2013, Abst 10. In one embodiment, an antigen binding domain against CD19 is an antigen binding portion, e.g., CDRs, of a CAR, antibody or antigen-binding fragment thereof described in, e.g., PCT publication WO2012/079000; PCT publication WO2014/153270; Kochenderfer, J. N. et al., J. Immunother. 32 (7), 689-702 (2009); Kochenderfer, J. N., et al., Blood, 116 (20), 4099-4102 (2010); PCT publication WO2014/031687; Bejcek, Cancer Research, 55, 2346-2351, 1995; or U.S. Pat. No. 7,446,190.

[0431] In an embodiment, the antigen-binding domain of a CAR, e.g., the CAR expressed by a cell of the invention, binds to BCMA. BCMA is found preferentially expressed in mature B lymphocytes. In an embodiment, the antigen binding domain is a murine scFv domain that binds to human BCMA. In an embodiment, the antigen binding domain is a humanized antibody or antibody fragment, e.g., scFv domain, that binds human BCMA. In an embodiment, the antigen binding domain is a human antibody or antibody fragment that binds to human BCMA. Exemplary scFv domains (and their sequences, e.g., CDRs, VL and VH sequences) that bind to BCMA are provided in Table 11, Table 12, Table 13 and Table 14. The scFv domain sequences provided in Table 11 and Table 12 include a light chain variable region (VL) and a heavy chain variable region (VH). The VL and VH are attached by a linker, e.g., in the following orientation: VH-linker-VL.

TABLE 11
Antigen Binding domains that bind BCMA
The amino acid sequences variable heavy chain and
variable light chain sequences for each scFv is also provided.

| | | |
|---|---|---|
| | SEQ | |
| Name/ | ID | |
| Description | NO: | Sequence |

139109

| | | |
|---|---|---|
| 139109-aa | 382 | EVQLVESGGGLVQPGGSLRLSCAVSGFALSNHGMSWVRRAPGKGLEW |
| ScFv domain | | VSGIVYSGSTYYAASVKGRFTISRDNSRNTLYLQMNSLRPEDTAIYYCSA |
| | | HGGESDVWGQGTTVTVSSASGGGGSGGRASGGGGSDIQLTQSPSSLS |
| | | ASVGDRVTITCRASQSISSYLNWYQQKPGKAPKLLIYAASSLQSGVPSRF |
| | | SGSGSGTDFTLTISSLQPEDFATYYCQQSYSTPYTFGQGTKVEIK |
| 139109-nt | 383 | GAAGTGCAATTGGTGGAATCAGGGGGAGGACTTGTGCAGCCTGGAG |
| ScFv domain | | GATCGCTGAGACTGTCATGTGCCGTGTCCGGCTTTGCCCTGTCCAAC |
| | | CACGGGATGTCCTGGGTCCGCCGCGCGCCTGGAAAGGGCCTCGAAT |
| | | GGGTGTCGGGTATTGTGTACAGCGGTAGCACCTACTATGCCGCATCC |
| | | GTGAAGGGGAGATTCACCATCAGCCGGGACAACTCCAGGAACACTCT |
| | | GTACCTCCAAATGAATTCGCTGAGGCCAGAGGACACTGCCATCTACT |
| | | ACTGCTCCGCGCATGGCGGAGAGTCCGACGTCTGGGGACAGGGGA |
| | | CCACCGTGACCGTGTCTAGCGCGTCCGGCGGAGGCGGCAGCGGGG |
| | | GTCGGGCATCAGGGGGCGGCGGATCGGACATCCAGCTCACCCAGTC |
| | | CCCGAGCTCGCTGTCCGCCTCCGTGGGAGATCGGGTCACCATCACG |
| | | TGCCGCGCCAGCCAGTCGATTTCCTCCTACCTGAACTGGTACCAACA |
| | | GAAGCCCGGAAAAGCCCCGAAGCTTCTCATCTACGCCGCCTCGAGC |
| | | CTGCAGTCAGGAGTGCCCTCACGGTTCTCCGGCTCCGGTTCCGGTA |
| | | CTGATTTCACCCTGACCATTTCCTCCCTGCAACCGGAGGACTTCGCT |
| | | ACTTACTACTGCCAGCAGTCGTACTCCACCCCCTACACTTTCGGACAA |
| | | GGCACCAAGGTCGAAATCAAG |
| 139109-aa | 384 | EVQLVESGGGLVQPGGSLRLSCAVSGFALSNHGMSWVRRAPGKGLEW |
| VH | | VSGIVYSGSTYYAASVKGRFTISRDNSRNTLYLQMNSLRPEDTAIYYCSA |
| | | HGGESDVWGQGTTVTVSS |
| 139109-aa | 385 | DIQLTQSPSSLSASVGDRVTITCRASQSISSYLNWYQQKPGKAPKLLIYA |
| VL | | ASSLQSGVPSRFSGSGSGTDFTLTISSLQPEDFATYYCQQSYSTPYTFG |
| | | QGTKVEIK |

139103

| | | |
|---|---|---|
| 139103-aa | 386 | QVQLVESGGGLVQPGRSLRLSCAASGFTFSNYAMSWVRQAPGKGLGW |
| ScFv domain | | VSGISRSGENTYYADSVKGRFTISRDNSKNTLYLQMNSLRDEDTAVYYC |
| | | ARSPAHYYGGMDVWGQGTTVTVSSASGGGGSGGRASGGGGSDIVLTQ |
| | | SPGTLSLSPGERATLSCRASQSISSSFLAWYQQKPGQAPRLLIYGASRR |
| | | ATGIPDRFSGSGSGTDFTLTISRLEPEDSAVYYCQQYHSSPSWTFGQGT |
| | | KLEIK |
| 139103-nt | 387 | CAAGTGCAACTCGTGGAATCTGGTGGAGGACTCGTGCAACCCGGAA |
| ScFv domain | | ATCGCTTAGACTGTCGTGTGCCGCCAGCGGGTTCACTTTCTCGAAC |
| | | TACGCGATGTCCTGGGTCCGCCAGGCACCCGGAAAGGGACTCGGTT |
| | | GGGTGTCCGGCATTTCCCGGTCCGGCGAAAATACCTACTACGCCGA |
| | | CTCCGTGAAGGGCCGCTTCACCATCTCAAGGGACAACAGCAAAAACA |
| | | CCCTGTACTTGCAAATGAACTCCCTGCGGGATGAAGATACAGCCGTG |
| | | TACTATTGCGCCCGGTCGCCTGCCCATTACTACGGCGGAATGGACGT |
| | | CTGGGGACAGGGAACCACTGTGACTGTCAGCAGCGCGTCGGGTGGC |
| | | GGCGGCTCAGGGGGTCGGGCCTCCGGGGGGGGAGGGTCCGACATC |
| | | GTGCTGACCCAGTCCCCGGGAACCCTGAGCCTGAGCCCGGGAGAGC |
| | | GCGCGACCCTGTCATGCCGGGCATCCCAGAGCATTAGCTCCTCCTTT |
| | | CTCGCCTGGTATCAGCAGAAGCCCGGACAGGCCCCGAGGCTGCTGA |
| | | TCTACGGCGCTAGCAGAAGGGCTACCGGAATCCCAGACCGGTTCTC |
| | | CGGCTCCGGTTCCGGGACCGATTTCACCCTTACTATCTCGCGCCTGG |
| | | AACCTGAGGACTCCGCCGTCTACTACTGCCAGCAGTACCACTCATCC |
| | | CCGTCGTGGACGTTCGGACAGGGCACCAAGCTGGAGATTAAG |
| 139103-aa | 388 | QVQLVESGGGLVQPGRSLRLSCAASGFTFSNYAMSWVRQAPGKGLGW |
| VH | | VSGISRSGENTYYADSVKGRFTISRDNSKNTLYLQMNSLRDEDTAVYYC |
| | | ARSPAHYYGGMDVWGQGTTVTVSS |
| 139103-aa | 389 | DIVLTQSPGTLSLSPGERATLSCRASQSISSSFLAWYQQKPGQAPRLLIY |
| VL | | GASRRATGIPDRFSGSGSGTDFTLTISRLEPEDSAVYYCQQYHSSPSWT |
| | | FGQGTKLEIK |

139105

| | | |
|---|---|---|
| 139105-aa | 390 | QVQLVESGGGLVQPGRSLRLSCAASGFTFDDYAMHWVRQAPGKGLEW |
| ScFv domain | | VSGISWNSGSIGYADSVKGRFTISRDNAKNSLYLQMNSLRAEDTALYYC |
| | | SVHSFLAYWGQGTLVTVSSASGGGGSGGRASGGGGSDIVMTQTPLSLP |
| | | VTPGEPASISCRSSQSLLHSNGYNYLDWYLQKPGQSPQLLIYLGSNRAS |
| | | GVPDRFSGSGSGTDFTLKISRVEAEDVGVYYCMQALQTPYTFGQGTKV |
| | | EIK |
| 139105-nt | 391 | CAAGTGCAACTCGTCGAATCCGGTGGAGGTCTGGTCCAACCTGGTAG |
| ScFv domain | | AAGCCTGAGACTGTCGTGTGCGGCCAGCGGATTCACCTTTGATGACT |
| | | ATGCTATGCACTGGGTGCGGCAGGCCCCAGGAAAGGGCCTGGAATG |
| | | GGTGTCGGGAATTAGCTGGAACTCCGGGTCCATTGGCTACGCCGAC |
| | | TCCGTGAAGGGCCGCTTCACCATCTCCCGCGACAACGCAAAGAACTC |
| | | CCTGTACTTGCAAATGAACTCGCTCAGGGCTGAGGATACCGCGCTGT |
| | | ACTACTGCTCCGTGCATTCCTTCCTGGCCTACTGGGGACAGGGAACT |
| | | CTGGTCACCGTGTCGAGCGCCTCCGGCGGCGGGGGCTCGGGTGGA |
| | | CGGGCCTCGGGCGGAGGGGGGTCCGACATCGTGATGACCCAGACC |
| | | CCGCTGAGCTTGCCCGTGACTCCCGGAGAGCCTGCATCCATCTCCT |
| | | GCCGGTCATCCCAGTCCCTTCTCCACTCCAACGGATACAACTACCTC |
| | | GACTGGTACCTCCAGAAGCCGGGACAGAGCCCTCAGCTTCTGATCTA |
| | | CCTGGGGTCAAATAGAGCCTCAGGAGTGCCGGATCGGTTCAGCGGA |
| | | TCTGGTTCGGGAACTGATTTCACTCTGAAGATTTCCCGCGTGGAAGC |
| | | CGAGGACGTGGGCGTCTACTACTGTATGCAGGCGCTGCAGACCCCC |
| | | TATACCTTCGGCCAAGGGACGAAAGTGGAGATCAAG |
| 139105-aa | 392 | QVQLVESGGGLVQPGRSLRLSCAASGFTFDDYAMHWVRQAPGKGLEW |
| VH | | VSGISWNSGSIGYADSVKGRFTISRDNAKNSLYLQMNSLRAEDTALYYC |
| | | SVHSFLAYWGQGTLVTVSS |
| 139105-aa | 393 | DIVMTQTPLSLPVTPGEPASISCRSSQSLLHSNGYNYLDWYLQKPGQSP |
| VL | | QLLIYLGSNRASGVPDRFSGSGSGTDFTLKISRVEAEDVGVYYCMQALQ |
| | | TPYTFGQGTKVEIK |

139111

| | | |
|---|---|---|
| 139111-aa | 394 | EVQLLESGGGLVQPGGSLRLSCAVSGFALSNHGMSWVRRAPGKGLEW |
| ScFv domain | | VSGIVYSGSTYYAASVKGRFTISRDNSRNTLYLQMNSLRPEDTAIYYCSA |
| | | HGGESDVWGQGTTVTVSSASGGGGSGGRASGGGGSDIVMTQTPLSLS |
| | | VTPGQPASISCKSSQSLLRNDGKTPLYWYLQKAGQPPQLLIYEVSNRFS |
| | | GVPDRFSGSGSGTDFTLKISRVEAEDVGAYYCMQNIQFPSFGGGTKLEI |
| | | K |
| 139111-nt | 395 | GAAGTGCAATTGTTGGAATCTGGAGGAGGACTTGTGCAGCCTGGAG |
| ScFv domain | | GATCACTGAGACTTTCGTGTGCGGTGTCAGGCTTCGCCCTGAGCAAC |
| | | CACGGCATGAGCTGGGTGCGGAGAGCCCCGGGGAAGGGTCTGGAA |
| | | TGGGTGTCCGGGATCGTCTACTCCGGTTCAACTTACTACGCCGCAAG |
| | | CGTGAAGGGTCGCTTCACCATTTCCCGCGATAACTCCCGGAACACCC |
| | | TGTACCTCCAAATGAACTCCCTGCGGCCCGAGGACACCGCCATCTAC |
| | | TACTGTTCCGCGCATGGAGGAGAGTCCGATGTCTGGGGACAGGGCA |
| | | CTACCGTGACCGTGTCGAGCGCCTCGGGGGGAGGAGGCTCCGGCG |
| | | GTCGCGCCTCCGGGGGGGGTGGCAGCGACATTGTGATGACGCAGA |
| | | CTCCACTCTCGCTGTCCGTGACCCCGGGACAGCCCGCGTCCATCTC |
| | | GTGCAAGAGCTCCCAGAGCCTGCTGAGGAACGACGGAAAGACTCCT |
| | | CTGTATTGGTACCTCCAGAAGGCTGGACAGCCCCCGCAACTGCTCAT |
| | | CTACGAAGTGTCAAATCGCTTCTCCGGGGTGCCGGATCGGTTTTCCG |
| | | GCTCGGGATCGGGCACCGACTTCACCCTGAAAATCTCCAGGGTCGA |
| | | GGCCGAGGACGTGGGAGCCTACTACTGCATGCAAAACATCCAGTTCC |
| | | CTTCCTTCGGCGGCGGCACAAAGCTGGAGATTAAG |
| 139111-aa | 396 | EVQLLESGGGLVQPGGSLRLSCAVSGFALSNHGMSWVRRAPGKGLEW |
| VH | | VSGIVYSGSTYYAASVKGRFTISRDNSRNTLYLQMNSLRPEDTAIYYCSA |
| | | HGGESDVWGQGTTVTVSS |
| 139111-aa | 397 | DIVMTQTPLSLSVTPGQPASISCKSSQSLLRNDGKTPLYWYLQKAGQPP |
| VL | | QLLIYEVSNRFSGVPDRFSGSGSGTDFTLKISRVEAEDVGAYYCMQNIQF |
| | | PSFGGGTKLEIK |

139100

| | | |
|---|---|---|
| 139100-aa | 398 | QVQLVQSGAEVRKTGASVKVSCKASGYIFDNFGINWVRQAPGQGLEWM |
| ScFv domain | | GWINPKNNNTNYAQKFQGRVTITADESTNTAYMEVSSLRSEDTAVYYCA |
| | | RGPYYYQSYMDVWGQGTMVTVSSASGGGGSGGRASGGGGSDIVMTQ |
| | | TPLSLPVTPGEPASISCRSSQSLLHSNGYNYLNWYLQKPGQSPQLLIYLG |
| | | SKRASGVPDRFSGSGSGTDFTLHITRVGAEDVGVYYCMQALQTPYTFG |
| | | QGTKLEIK |
| 139100-nt | 399 | CAAGTCCAACTCGTCCAGTCCGGCGCAGAAGTCAGAAAAACCGGTG |
| ScFv domain | | CTAGCGTGAAAGTGTCCTGCAAGGCCTCCGGCTACATTTTCGATAAC |
| | | TTCGGAATCAACTGGGTCAGACAGGCCCCGGGCCAGGGGCTGGAAT |
| | | GGATGGGATGGATCAACCCCAAGAACAACAACACCAACTACGCACAG |
| | | AAGTTCCAGGGCCGCGTGACTATCACCGCCGATGAATCGACCAATAC |
| | | CGCCTACATGGAGGTGTCCTCCCTGCGGTCGGAGGACACTGCCGTG |
| | | TATTACTGCGCGAGGGGCCCATACTACTACCAAAGCTACATGGACGT |
| | | CTGGGGACAGGGAACCATGGTGACCGTGTCATCCGCCTCCGGTGGT |
| | | GGAGGCTCCGGGGGGCGGGCTTCAGGAGGCGGAGGAAGCGATATT |
| | | GTGATGACCCAGACTCCGCTTAGCCTGCCCGTGACTCCTGGAGAACC |
| | | GGCCTCCATTTCCTGCCGGTCCTCGCAATCACTCCTGCATTCCAACG |
| | | GTTACAACTACCTGAATTGGTACCTCCAGAAGCCTGGCCAGTCGCCC |
| | | CAGTTGCTGATCTATCTGGGCTCGAAGCGCGCCTCCGGGGTGCCTG |
| | | ACCGGTTTAGCGGATCTGGGAGCGGCACGGACTTCACTCTCCACATC |
| | | ACCCGCGTGGGAGCGGAGGACGTGGGAGTGTACTACTGTATGCAGG |
| | | CGCTGCAGACTCCGTACACATTCGGACAGGGCACCAAGCTGGAGAT |
| | | CAAG |
| 139100-aa | 400 | QVQLVQSGAEVRKTGASVKVSCKASGYIFDNFGINWVRQAPGQGLEWM |
| VH | | GWINPKNNNTNYAQKFQGRVTITADESTNTAYMEVSSLRSEDTAVYYCA |
| | | RGPYYYQSYMDVWGQGTMVTVSS |
| 139100-aa | 401 | DIVMTQTPLSLPVTPGEPASISCRSSQSLLHSNGYNYLNWYLQKPGQSP |
| VL | | QLLIYLGSKRASGVPDRFSGSGSGTDFTLHITRVGAEDVGVYYCMQALQ |
| | | TPYTFGQGTKLEIK |

139101

| | | |
|---|---|---|
| 139101-aa | 402 | QVQLQESGGGLVQPGGSLRLSCAASGFTFSSDAMTWVRQAPGKGLEW |
| ScFv domain | | VSVISGSGGTTYYADSVKGRFTISRDNSKNTLYLQMNSLRAEDTAVYYC |
| | | AKLDSSGYYYARGPRYWGQGTLVTVSSASGGGGSGGRASGGGGSDIQ |
| | | LTQSPSSLSASVGDRVTITCRASQSISSYLNWYQQKPGKAPKLLIYGAST |
| | | LASGVPARFSGSGSGTHFTLTINSLQSEDSATYYCQQSYKRASFGQGTK |
| | | VEIK |
| 139101-nt | 403 | CAAGTGCAACTTCAAGAATCAGGCGGAGGACTCGTGCAGCCCGGAG |
| ScFv domain | | GATCATTGCGGCTCTCGTGCGCCGCCTCGGGCTTCACCTTCTCGAGC |
| | | GACGCCATGACCTGGGTCCGCCAGGCCCCGGGGAAGGGGCTGGAA |
| | | TGGGTGTCTGTGATTTCCGGCTCCGGGGGAACTACGTACTACGCCGA |
| | | TTCCGTGAAAGGTCGCTTCACTATCTCCCGGGACAACAGCAAGAACA |
| | | CCCTTTATCTGCAAATGAATTCCCTCCGCGCCGAGGACACCGCCGTG |
| | | TACTACTGCGCCAAGCTGGACTCCTCGGGCTACTACTATGCCCGGGG |
| | | TCCGAGATACTGGGGACAGGGAACCCTCGTGACCGTGTCCTCCGCG |
| | | TCCGGCGGAGGAGGGTCGGGAGGGCGGGCCTCCGGCGGCGGCGG |
| | | TTCGGACATCCAGCTGACCCAGTCCCCATCCTCACTGAGCGCAAGCG |
| | | TGGGCGACAGAGTCACCATTACATGCAGGGCGTCCCAGAGCATCAG |
| | | CTCCTACCTGAACTGGTACCAACAGAAGCCTGGAAAGGCTCCTAAGC |
| | | TGTTGATCTACGGGGCTTCGACCCTGGCATCCGGGGTGCCCGCGAG |
| | | GTTTAGCGGAAGCGGTAGCGGCACTCACTTCACTCTGACCATTAACA |
| | | GCCTCCAGTCCGAGGATTCAGCCACTTACTACTGTCAGCAGTCCTAC |
| | | AAGCGGGCCAGCTTCGGACAGGGCACTAAGGTCGAGATCAAG |
| 139101-aa | 404 | QVQLQESGGGLVQPGGSLRLSCAASGFTFSSDAMTWVRQAPGKGLEW |
| VH | | VSVISGSGGTTYYADSVKGRFTISRDNSKNTLYLQMNSLRAEDTAVYYC |
| | | AKLDSSGYYYARGPRYWGQGTLVTVSS |
| 139101-aa | 405 | DIQLTQSPSSLSASVGDRVTITCRASQSISSYLNWYQQKPGKAPKLLIYG |
| VL | | ASTLASGVPARFSGSGSGTHFTLTINSLQSEDSATYYCQQSYKRASFGQ |
| | | GTKVEIK |

139102

| | | |
|---|---|---|
| 139102-aa | 406 | QVQLVQSGAEVKKPGASVKVSCKASGYTFSNYGITWVRQAPGQGLEW |
| ScFv domain | | MGWISAYNGNTNYAQKFQGRVTMTRNTSISTAYMELSSLRSEDTAVYYC |
| | | ARGPYYYYMDVWGKGTMVTVSSASGGGGSGGRASGGGGSEIVMTQS |
| | | PLSLPVTPGEPASISCRSSQSLLYSNGYNYVDWYLQKPGQSPQLLIYLGS |
| | | NRASGVPDRFSGSGSGTDFKLQISRVEAEDVGIYYCMQGRQFPYSFGQ |
| | | GTKVEIK |
| 139102-nt | 407 | CAAGTCCAACTGGTCCAGAGCGGTGCAGAAGTGAAGAAGCCCGGAG |
| ScFv domain | | CGAGCGTGAAAGTGTCCTGCAAGGCTTCCGGGTACACCTTCTCCAAC |
| | | TACGGCATCACTTGGGTGCGCCAGGCCCCGGGACAGGGCCTGGAAT |
| | | GGATGGGGTGGATTTCCGCGTACAACGGCAATACGAACTACGCTCAG |
| | | AAGTTCCAGGGTAGAGTGACCATGACTAGGAACACCTCCATTTCCAC |
| | | CGCCTACATGGAACTGTCCTCCCTGCGGAGCGAGGACACCGCCGTG |
| | | TACTATTGCGCCCGGGGACCATACTACTACTACATGGATGTCTGGGG |
| | | GAAGGGGACTATGGTCACCGTGTCATCCGCCTCGGGAGGCGGCGGA |
| | | TCAGGAGGACGCGCCTCTGGTGGTGGAGGATCGGAGATCGTGATGA |
| | | CCCAGAGCCCTCTCTCCTTGCCCGTGACTCCTGGGGAGCCCGCATC |
| | | CATTTCATGCCGGAGCTCCCAGTCACTTCTCTACTCCAACGGCTATAA |
| | | CTACGTGGATTGGTACCTCCAAAAGCCGGGCCAGAGCCCGCAGCTG |
| | | CTGATCTACCTGGGCTCGAACAGGGCCAGCGGAGTGCCTGACCGGT |
| | | TCTCCGGGTCGGGAAGCGGGACCGACTTCAAGCTGCAAATCTCGAG |
| | | AGTGGAGGCCGAGGACGTGGGAATCTACTACTGTATGCAGGGCCGC |
| | | CAGTTTCCGTACTCGTTCGGACAGGGCACCAAAGTGGAAATCAAG |
| 139102-aa | 408 | QVQLVQSGAEVKKPGASVKVSCKASGYTFSNYGITWVRQAPGQGLEW |
| VH | | MGWISAYNGNTNYAQKFQGRVTMTRNTSISTAYMELSSLRSEDTAVYYC |
| | | ARGPYYYYMDVWGKGTMVTVSS |
| 139102-aa | 409 | EIVMTQSPLSLPVTPGEPASISCRSSQSLLYSNGYNYVDWYLQKPGQSP |
| VL | | QLLIYLGSNRASGVPDRFSGSGSGTDFKLQISRVEAEDVGIYYCMQGRQ |
| | | FPYSFGQGTKVEIK |

139104

| | | |
|---|---|---|
| 139104-aa | 410 | EVQLLETGGGLVQPGGSLRLSCAVSGFALSNHGMSWVRRAPGKGLEW |
| ScFv domain | | VSGIVYSGSTYYAASVKGRFTISRDNSRNTLYLQMNSLRPEDTAIYYCSA |
| | | HGGESDVWGQGTTVTVSSASGGGGSGGRASGGGGSEIVLTQSPATLS |
| | | VSPGESATLSCRASQSVSSNLAWYQQKPGQAPRLLIYGASTRASGIPDR |
| | | FSGSGSGTDFTLTISSLQAEDVAVYYCQQYGSSLTFGGGTKVEIK |
| 139104-nt | 411 | GAAGTGCAATTGCTCGAAACTGGAGGAGGTCTGGTGCAACCTGGAG |
| ScFv domain | | GATCACTTCGCCTGTCCTGCGCCGTGTCGGGCTTTGCCCTGTCCAAC |
| | | CATGGAATGAGCTGGGTCCGCCGCGCGCCGGGGAAGGGCCTCGAA |
| | | TGGGTGTCCGGCATCGTCTACTCCGGCTCCACCTACTACGCCGCGTC |
| | | CGTGAAGGGCCGGTTCACGATTTCACGGGACAACTCGCGGAACACC |
| | | CTGTACCTCCAAATGAATTCCCTTCGGCCGGAGGATACTGCCATCTA |
| | | CTACTGCTCCGCCCACGGTGGCGAATCCGACGTCTGGGGCCAGGGA |
| | | ACCACCGTGACCGTGTCCAGCGCGTCCGGGGGAGGAGGAAGCGGG |
| | | GGTAGAGCATCGGGTGGAGGCGGATCAGAGATCGTGCTGACCCAGT |
| | | CCCCCGCCACCTTGAGCGTGTCACCAGGAGAGTCCGCCACCCTGTC |
| | | ATGCCGCGCCAGCCAGTCCGTGTCCTCCAACCTGGCTTGGTACCAG |
| | | CAGAAGCCGGGGCAGGCCCCTAGACTCCTGATCTATGGGGCGTCGA |
| | | CCCGGGCATCTGGAATTCCCGATAGGTTCAGCGGATCGGGCTCGGG |
| | | CACTGACTTCACTCTGACCATCTCCTCGCTGCAAGCCGAGGACGTGG |
| | | CTGTGTACTACTGTCAGCAGTACGGAAGCTCCCTGACTTTCGGTGGC |
| | | GGGACCAAAGTCGAGATTAAG |
| 139104-aa | 412 | EVQLLETGGGLVQPGGSLRLSCAVSGFALSNHGMSWVRRAPGKGLEW |
| VH | | VSGIVYSGSTYYAASVKGRFTISRDNSRNTLYLQMNSLRPEDTAIYYCSA |
| | | HGGESDVWGQGTTVTVSS |
| 139104-aa | 413 | EIVLTQSPATLSVSPGESATLSCRASQSVSSNLAWYQQKPGQAPRLLIY |
| VL | | GASTRASGIPDRFSGSGSGTDFTLTISSLQAEDVAVYYCQQYGSSLTFG |
| | | GGTKVEIK |

139106

| | | |
|---|---|---|
| 139106-aa | 414 | EVQLVETGGGLVQPGGSLRLSCAVSGFALSNHGMSWVRRAPGKGLEW |
| ScFv domain | | VSGIVYSGSTYYAASVKGRFTISRDNSRNTLYLQMNSLRPEDTAIYYCSA |
| | | HGGESDVWGQGTTVTVSSASGGGGSGGRASGGGGSEIVMTQSPATLS |
| | | VSPGERATLSCRASQSVSSKLAWYQQKPGQAPRLLMYGASIRATGIPDR |
| | | FSGSGSGTEFTLTISSLEPEDFAVYYCQQYGSSSWTFGQGTKVEIK |
| 139106-nt | 415 | GAAGTGCAATTGGTGGAAACTGGAGGAGGACTTGTGCAACCTGGAG |
| ScFv domain | | GATCATTGAGACTGAGCTGCGCAGTGTCGGGATTCGCCCTGAGCAAC |
| | | CATGGAATGTCCTGGGTCAGAAGGGCCCCTGGAAAAGGCCTCGAAT |
| | | GGGTGTCAGGGATCGTGTACTCCGGTTCCACTTACTACGCCGCCTCC |
| | | GTGAAGGGGCGCTTCACTATCTCACGGGATAACTCCCGCAATACCCT |
| | | GTACCTCCAAATGAACAGCCTGCGGCCGGAGGATACCGCCATCTACT |
| | | ACTGTTCCGCCCACGGTGGAGAGTCTGACGTCTGGGGCCAGGGAAC |
| | | TACCGTGACCGTGTCCTCCGCGTCCGGCGGTGGAGGGAGCGGCGG |
| | | CCGCGCCAGCGGCGGCGGAGGCTCCGAGATCGTGATGACCCAGAG |
| | | CCCCGCTACTCTGTCGGTGTCGCCCGGAGAAAGGGCGACCCTGTCC |
| | | TGCCGGGCGTCGCAGTCCGTGAGCAGCAAGCTGGCTTGGTACCAGC |
| | | AGAAGCCGGGCCAGGCACCACGCCTGCTTATGTACGGTGCCTCCAT |
| | | TCGGGCCACCGGAATCCCGGACCGGTTCTCGGGGTCGGGGTCCGG |
| | | TACCGAGTTCACACTGACCATTTCCTCGCTCGAGCCCGAGGACTTTG |
| | | CCGTCTATTACTGCCAGCAGTACGGCTCCTCCTCATGGACGTTCGGC |
| | | CAGGGGACCAAGGTCGAAATCAAG |
| 139106-aa | 416 | EVQLVETGGGLVQPGGSLRLSCAVSGFALSNHGMSWVRRAPGKGLEW |
| VH | | VSGIVYSGSTYYAASVKGRFTISRDNSRNTLYLQMNSLRPEDTAIYYCSA |
| | | HGGESDVWGQGTTVTVSS |
| 139106-aa | 417 | EIVMTQSPATLSVSPGERATLSCRASQSVSSKLAWYQQKPGQAPRLLM |
| VL | | YGASIRATGIPDRFSGSGSGTEFTLTISSLEPEDFAVYYCQQYGSSSWTF |
| | | GQGTKVEIK |

139107

| | | |
|---|---|---|
| 139107-aa | 418 | EVQLVETGGGVVQPGGSLRLSCAVSGFALSNHGMSWVRRAPGKGLEW |
| ScFv domain | | VSGIVYSGSTYYAASVKGRFTISRDNSRNTLYLQMNSLRPEDTAIYYCSA |
| | | HGGESDVWGQGTTVTVSSASGGGGSGGRASGGGGSEIVLTQSPGTLS |
| | | LSPGERATLSCRASQSVGSTNLAWYQQKPGQAPRLLIYDASNRATGIPD |
| | | RFSGGGSGTDFTLTISRLEPEDFAVYYCQQYGSSPPWTFGQGTKVEIK |
| 139107-nt | 419 | GAAGTGCAATTGGTGGAGACTGGAGGAGGAGTGGTGCAACCTGGAG |
| ScFv domain | | GAAGCCTGAGACTGTCATGCGCGGTGTCGGGCTTCGCCCTCTCCAA |
| | | CCACGGAATGTCCTGGGTCCGCCGGGCCCCTGGGAAAGGACTTGAA |
| | | TGGGTGTCCGGCATCGTGTACTCGGGTTCCACCTACTACGCGGCCTC |
| | | AGTGAAGGGCCGGTTTACTATTAGCCGCGACAACTCCAGAAACACAC |
| | | TGTACCTCCAAATGAACTCGCTGCGGCCGGAAGATACCGCTATCTAC |
| | | TACTGCTCCGCCCATGGGGGAGAGTCGGACGTCTGGGGACAGGGCA |
| | | CCACTGTCACTGTGTCCAGCGCTTCCGGCGGTGGTGGAAGCGGGGG |
| | | ACGGGCCTCAGGAGGCGGTGGCAGCGAGATTGTGCTGACCCAGTCC |
| | | CCCGGGACCCTGAGCCTGTCCCCGGGAGAAAGGGCCACCCTCTCCT |
| | | GTCGGGCATCCCAGTCCGTGGGGTCTACTAACCTTGCATGGTACCAG |
| | | CAGAAGCCCGGCCAGGCCCCTCGCCTGCTGATCTACGACGCGTCCA |
| | | ATAGAGCCACCGGCATCCCGGATCGCTTCAGCGGAGGCGGATCGGG |
| | | CACCGACTTCACCCTCACCATTTCAAGGCTGGAACCGGAGGACTTCG |
| | | CCGTGTACTACTGCCAGCAGTATGGTTCGTCCCCACCCTGGACGTTC |
| | | GGCCAGGGGACTAAGGTCGAGATCAAG |
| 139107-aa | 420 | EVQLVETGGGVVQPGGSLRLSCAVSGFALSNHGMSWVRRAPGKGLEW |
| VH | | SGIVYSGSTYYAASVKGRFTISRDNSRNTLYLQMNSLRPEDTAIYYCSA |
| | | HGGESDVWGQGTTVTVSS |
| 139107-aa | 421 | EIVLTQSPGTLSLSPGERATLSCRASQSVGSTNLAWYQQKPGQAPRLLI |
| VL | | YDASNRATGIPDRFSGGGSGTDFTLTISRLEPEDFAVYYCQQYGSSPPW |
| | | TFGQGTKVEIK |

139108

| | | |
|---|---|---|
| 139108-aa | 422 | QVQLVESGGGLVKPGGSLRLSCAASGFTFSDYYMSWIRQAPGKGLEWV |
| ScFv domain | | SYISSSGSTIYYADSVKGRFTISRDNAKNSLYLQMNSLRAEDTAVYYCAR |
| | | ESGDGMDVWGQGTTVTVSSASGGGGSGGRASGGGGSDIQMTQSPSS |
| | | LSASVGDRVTITCRASQSISSYLNWYQQKPGKAPKLLIYAASSLQSGVPS |
| | | RFSGSGSGTDFTLTISSLQPEDFATYYCQQSYTLAFGQGTKVDIK |
| 139108-nt | 423 | CAAGTGCAACTCGTGGAATCTGGTGGAGGACTCGTGAAACCTGGAG |
| ScFv domain | | GATCATTGAGACTGTCATGCGCGGCCTCGGGATTCACGTTCTCCGAT |
| | | TACTACATGAGCTGGATTCGCCAGGCTCCGGGGAAGGGACTGGAAT |
| | | GGGTGTCCTACATTTCCTCATCCGGCTCCACCATCTACTACGCGGAC |
| | | TCCGTGAAGGGGAGATTCACCATTAGCCGCGATAACGCCAAGAACAG |
| | | CCTGTACCTTCAGATGAACTCCCTGCGGGCTGAAGATACTGCCGTCT |
| | | ACTACTGCGCAAGGGAGAGCGGAGATGGGATGGACGTCTGGGGACA |
| | | GGGTACCACTGTGACCGTGTCGTCGGCCTCCGGCGGAGGGGGTTCG |
| | | GGTGGAAGGGCCAGCGGCGGCGGAGGCAGCGACATCCAGATGACC |
| | | CAGTCCCCCTCATCGCTGTCCGCCTCCGTGGGCGACCGCGTCACCA |
| | | TCACATGCCGGGCCTCACAGTCGATCTCCTCCTACCTCAATTGGTAT |
| | | CAGCAGAAGCCCGGAAAGGCCCCTAAGCTTCTGATCTACGCAGCGT |
| | | CCTCCCTGCAATCCGGGGTCCCATCTCGGTTCTCCGGCTCGGGCAG |
| | | CGGTACCGACTTCACTCTGACCATCTCGAGCCTGCAGCCGGAGGACT |
| | | TCGCCACTTACTACTGTCAGCAAAGCTACACCCTCGCGTTTGGCCAG |
| | | GGCACCAAAGTGGACATCAAG |
| 139108-aa | 424 | QVQLVESGGGLVKPGGSLRLSCAASGFTFSDYYMSWIRQAPGKGLEWV |
| VH | | SYISSSGSTIYYADSVKGRFTISRDNAKNSLYLQMNSLRAEDTAVYYCAR |
| | | ESGDGMDVWGQGTTVTVSS |
| 139108-aa | 425 | DIQMTQSPSSLSASVGDRVTITCRASQSISSYLNWYQQKPGKAPKLLIYA |
| VL | | ASSLQSGVPSRFSGSGSGTDFTLTISSLQPEDFATYYCQQSYTLAFGQG |
| | | TKVDIK |

139110

| | | |
|---|---|---|
| 139110-aa | 426 | QVQLVQSGGGLVKPGGSLRLSCAASGFTFSDYYMSWIRQAPGKGLEW |
| ScFv domain | | VSYISSSGNTIYYADSVKGRFTISRDNAKNSLYLQMNSLRAEDTAVYYCA |
| | | RSTMVREDYWGQGTLVTVSSASGGGGSGGRASGGGGSDIVLTQSPLS |
| | | LPVTLGQPASISCKSSESLVHNSGKTYLNWFHQRPGQSPRRLIYEVSNR |
| | | DSGVPDRFTGSGSGTDFTLKISRVEAEDVGVYYCMQGTHWPGTFGQGT |
| | | KLEIK |
| 139110-nt | 427 | CAAGTGCAACTGGTGCAAAGCGGAGGAGGATTGGTCAAACCCGGAG |
| ScFv domain | | GAAGCCTGAGACTGTCATGCGCGGCCTCTGGATTCACCTTCTCCGAT |
| | | TACTACATGTCATGGATCAGACAGGCCCCGGGGAAGGGCCTCGAAT |
| | | GGGTGTCCTACATCTCGTCCTCCGGGAACACCATCTACTACGCCGAC |
| | | AGCGTGAAGGGCCGCTTTACCATTTCCCGCGACAACGCAAAGAACTC |
| | | GCTGTACCTTCAGATGAATTCCCTGCGGGCTGAAGATACCGCGGTGT |
| | | ACTATTGCGCCCGGTCCACTATGGTCCGGGAGGACTACTGGGGACA |
| | | GGGCACACTCGTGACCGTGTCCAGCGCGAGCGGGGGTGGAGGCAG |
| | | CGGTGGACGCGCCTCCGGCGGCGGCGGTTCAGACATCGTGCTGACT |
| | | CAGTCGCCCCTGTCGCTGCCGGTCACCCTGGGCCAACCGGCCTCAA |
| | | TTAGCTGCAAGTCCTCGGAGAGCCTGGTGCACAACTCAGGAAAGACT |
| | | TACCTGAACTGGTTCCATCAGCGGCCTGGACAGTCCCCACGGAGGC |
| | | TCATCTATGAAGTGTCCAACAGGGATTCGGGGGTGCCCGACCGCTTC |
| | | ACTGGCTCCGGGTCCGGCACCGACTTCACCTTGAAAATCTCCAGAGT |
| | | GGAAGCCGAGGACGTGGGCGTGTACTACTGTATGCAGGGTACCCAC |
| | | TGGCCTGGAACCTTTGGACAAGGAACTAAGCTCGAGATTAAG |
| 139110-aa | 428 | QVQLVQSGGGLVKPGGSLRLSCAASGFTFSDYYMSWIRQAPGKGLEW |
| VH | | VSYISSSGNTIYYADSVKGRFTISRDNAKNSLYLQMNSLRAEDTAVYYCA |
| | | RSTMVREDYWGQGTLVTVSS |
| 139110-aa | 429 | DIVLTQSPLSLPVTLGQPASISCKSSESLVHNSGKTYLNWFHQRPGQSP |
| VL | | RRLIYEVSNRDSGVPDRFTGSGSGTDFTLKISRVEAEDVGVYYCMQGTH |
| | | WPGTFGQGTKLEIK |

139112

| | | |
|---|---|---|
| 139112-aa | 430 | QVQLVESGGGLVQPGGSLRLSCAVSGFALSNHGMSWVRRAPGKGLEW |
| ScFv domain | | VSGIVYSGSTYYAASVKGRFTISRDNSRNTLYLQMNSLRPEDTAIYYCSA |
| | | HGGESDVWGQGTTVTVSSASGGGGSGGRASGGGGSDIRLTQSPSPLS |
| | | ASVGDRVTITCQASEDINKFLNWYHQTPGKAPKLLIYDASTLQTGVPSRF |
| | | SGSGSGTDFTLTINSLQPEDIGTYYCQQYESLPLTFGGGTKVEIK |
| 139112-nt | 431 | CAAGTGCAACTCGTGGAATCTGGTGGAGGACTCGTGCAACCCGGTG |
| ScFv domain | | GAAGCCTTAGGCTGTCGTGCGCCGTCAGCGGGTTTGCTCTGAGCAA |
| | | CCATGGAATGTCCTGGGTCCGCCGGGCACCGGGAAAAGGGCTGGAA |
| | | TGGGTGTCCGGCATCGTGTACAGCGGGTCAACCTATTACGCCGCGT |
| | | CCGTGAAGGGCAGATTCACTATCTCAAGAGACAACAGCCGGAACACC |
| | | CTGTACTTGCAAATGAATTCCCTGCGCCCCGAGGACACCGCCATCTA |
| | | CTACTGCTCCGCCCACGGAGGAGAGTCGGACGTGTGGGGCCAGGG |
| | | AACGACTGTGACTGTGTCCAGCGCATCAGGAGGGGGTGGTTCGGGC |
| | | GGCCGGGCCTCGGGGGGAGGAGGTTCCGACATTCGGCTGACCCAG |
| | | TCCCCGTCCCCACTGTCGGCCTCCGTCGGCGACCGCGTGACCATCA |
| | | CTTGTCAGGCGTCCGAGGACATTAACAAGTTCCTGAACTGGTACCAC |
| | | CAGACCCCTGGAAAGGCCCCCAAGCTGCTGATCTACGATGCCTCGA |
| | | CCCTTCAAACTGGAGTGCCTAGCCGGTTCTCCGGGTCCGGCTCCGG |
| | | CACTGATTTCACTCTGACCATCAACTCATTGCAGCCGGAAGATATCGG |
| | | GACCTACTATTGCCAGCAGTACGAATCCCTCCCGCTCACATTCGGCG |
| | | GGGGAACCAAGGTCGAGATTAAG |
| 139112-aa | 432 | QVQLVESGGGLVQPGGSLRLSCAVSGFALSNHGMSWVRRAPGKGLEW |
| VH | | VSGIVYSGSTYYAASVKGRFTISRDNSRNTLYLQMNSLRPEDTAIYYCSA |
| | | HGGESDVWGQGTTVTVSS |
| 139112-aa | 433 | DIRLTQSPSPLSASVGDRVTITCQASEDINKFLNWYHQTPGKAPKLLIYDA |
| VL | | STLQTGVPSRFSGSGSGTDFTLTINSLQPEDIGTYYCQQYESLPLTFGGG |
| | | TKVEIK |

139113

| | | |
|---|---|---|
| 139113-aa | 434 | EVQLVETGGGLVQPGGSLRLSCAVSGFALSNHGMSWVRRAPGKGLEW |
| ScFv domain | | VSGIVYSGSTYYAASVKGRFTISRDNSRNTLYLQMNSLRPEDTAIYYCSA |
| | | HGGESDVWGQGTTVTVSSASGGGGSGGRASGGGGSETTLTQSPATLS |
| | | VSPGERATLSCRASQSVGSNLAWYQQKPGQGPRLLIYGASTRATGIPAR |
| | | FSGSGSGTEFTLTISSLQPEDFAVYYCQQYNDWLPVTFGQGTKVEIK |
| 139113-nt | 435 | GAAGTGCAATTGGTGGAAACTGGAGGAGGACTTGTGCAACCTGGAG |
| ScFv domain | | GATCATTGCGGCTCTCATGCGCTGTCTCCGGCTTCGCCCTGTCAAAT |
| | | CACGGGATGTCGTGGGTCAGACGGGCCCCGGGAAAGGGTCTGGAAT |
| | | GGGTGTCGGGGATTGTGTACAGCGGCTCCACCTACTACGCCGCTTC |
| | | GGTCAAGGGCCGCTTCACTATTTCACGGGACAACAGCCGCAACACCC |
| | | TCTATCTGCAAATGAACTCTCTCCGCCCGGAGGATACCGCCATCTAC |
| | | TACTGCTCCGCACACGGCGGCGAATCCGACGTGTGGGGACAGGGAA |
| | | CCACTGTCACCGTGTCGTCCGCATCCGGTGGCGGAGGATCGGGTGG |
| | | CCGGGCCTCCGGGGGCGGCGGCAGCGAGACTACCCTGACCCAGTC |
| | | CCCTGCCACTCTGTCCGTGAGCCCGGGAGAGAGAGCCACCCTTAGC |
| | | TGCCGGGCCAGCCAGAGCGTGGGCTCCAACCTGGCCTGGTACCAGC |
| | | AGAAGCCAGGACAGGGTCCCAGGCTGCTGATCTACGGAGCCTCCAC |
| | | TCGCGCGACCGGCATCCCCGCGAGGTTCTCCGGGTCGGGTTCCGG |
| | | GACCGAGTTCACCCTGACCATCTCCTCCCTCCAACCGGAGGACTTCG |
| | | CGGTGTACTACTGTCAGCAGTACAACGATTGGCTGCCCGTGACATTT |
| | | GGACAGGGGACGAAGGTGGAAATCAAA |
| 139113-aa | 436 | EVQLVETGGGLVQPGGSLRLSCAVSGFALSNHGMSWVRRAPGKGLEW |
| VH | | VSGIVYSGSTYYAASVKGRFTISRDNSRNTLYLQMNSLRPEDTAIYYCSA |
| | | HGGESDVWGQGTTVTVSS |
| 139113-aa | 437 | ETTLTQSPATLSVSPGERATLSCRASQSVGSNLAWYQQKPGQGPRLLIY |
| VL | | GASTRATGIPARFSGSGSGTEFTLTISSLQPEDFAVYYCQQYNDWLPVT |
| | | FGQGTKVEIK |

139114

| | | |
|---|---|---|
| 139114-aa | 438 | EVQLVESGGGLVQPGGSLRLSCAVSGFALSNHGMSWVRRAPGKGLEW |
| ScFv domain | | VSGIVYSGSTYYAASVKGRFTISRDNSRNTLYLQMNSLRPEDTAIYYCSA |
| | | HGGESDVWGQGTTVTVSSASGGGGSGGRASGGGGSEIVLTQSPGTLS |
| | | LSPGERATLSCRASQSIGSSSLAWYQQKPGQAPRLLMYGASSRASGIPD |
| | | RFSGSGSGTDFTLTISRLEPEDFAVYYCQQYAGSPPFTFGQGTKVEIK |
| 139114-nt | 439 | GAAGTGCAATTGGTGGAATCTGGTGGAGGACTTGTGCAACCTGGAG |
| ScFv domain | | GATCACTGAGACTGTCATGCGCGGTGTCCGGTTTTGCCCTGAGCAAT |
| | | CATGGGATGTCGTGGGTCCGGCGCGCCCCCGGAAAGGGTCTGGAAT |
| | | GGGTGTCGGGTATCGTCTACTCCGGGAGCACTTACTACGCCGCGAG |
| | | CGTGAAGGGCCGCTTCACCATTTCCCGCGATAACTCCCGCAACACCC |
| | | TGTACTTGCAAATGAACTCGCTCCGGCCTGAGGACACTGCCATCTAC |
| | | TACTGCTCCGCACACGGAGGAGAATCCGACGTGTGGGGCCAGGGAA |
| | | CTACCGTGACCGTCAGCAGCGCCTCCGGCGGCGGGGGCTCAGGCG |
| | | GACGGGCTAGCGGCGGCGGTGGCTCCGAGATCGTGCTGACCCAGT |
| | | CGCCTGGCACTCTCTCGCTGAGCCCCGGGGAAAGGGCAACCCTGTC |
| | | CTGTCGGGCCAGCCAGTCCATTGGATCATCCTCCCTCGCCTGGTATC |
| | | AGCAGAAACCGGGACAGGCTCCGCGGCTGCTTATGTATGGGGCCAG |
| | | CTCAAGAGCCTCCGGCATTCCCGACCGGTTCTCCGGGTCCGGTTCC |
| | | GGCACCGATTTCACCCTGACTATCTCGAGGCTGGAGCCAGAGGACTT |
| | | CGCCGTGTACTACTGCCAGCAGTACGCGGGGTCCCCGCCGTTCACG |
| | | TTCGGACAGGGAACCAAGGTCGAGATCAAG |
| 139114-aa | 440 | EVQLVESGGGLVQPGGSLRLSCAVSGFALSNHGMSWVRRAPGKGLEW |
| VH | | VSGIVYSGSTYYAASVKGRFTISRDNSRNTLYLQMNSLRPEDTAIYYCSA |
| | | HGGESDVWGQGTTVTVSS |
| 139114-aa | 441 | EIVLTQSPGTLSLSPGERATLSCRASQSIGSSSLAWYQQKPGQAPRLLM |
| VL | | YGASSRASGIPDRFSGSGSGTDFTLTISRLEPEDFAVYYCQQYAGSPPF |
| | | TFGQGTKVEIK |

149362

| | | |
|---|---|---|
| 149362-aa | 442 | Qvqlqesgpglvkpsetlsltctvsggsisssyyywgwirqppgkglewigsiyysgsayynpslksrv |
| ScFv domain | | tisvdtsknqfslrlssvtaadtavyycarhwqewpdafdiwgqgtmvtvssggggsggggsggggs |
| | | ettltqspafmsatpgdkviisckasqdiddamnwyqqkpgeaplfiiqsatspvpgipprfsgsgfgt |
| | | dfsltinniesedaayyfclqhdnfpltfgqgtkleik |
| 149362-nt | 443 | caagtgcagcttcaggaaagcggaccgggcctggtcaagccatccgaaactctctccctgacttgca |
| ScFv domain | | ctgtgtctggcggttccatctcatcgtcgtactactactggggctggattaggcagccgcccggaaagg |
| | | gactggagtggatcggaagcatctactattccggctcggcgtactacaaccctagcctcaagtcgaga |
| | | gtgaccatctccgtggatacctccaagaaccagttttccctgcgcctgagctccgtgaccgccgctgac |
| | | accgccgtgtactactgtgctcggcattggcaggaatggcccgatgccttcgacatttggggccagggc |
| | | actatggtcactgtgtcatccgggggtggaggcagcgggggaggagggtccggggggggaggttca |
| | | gagacaaccttgacccagtcacccgcattcatgtccgccactccgggagacaaggtcatcatctcgtg |
| | | caaagcgtcccaggatatcgacgatgccatgaattggtaccagcagaagcctggcgaagcgccgct |
| | | gttcattatccaatccgcaacctcgcccgtgcctggaatcccaccgcggttcagcggcagcggtttcgg |
| | | aaccgacttttccctgaccattaacaacattgagtccgaggacgccgcctactacttctgcctgcaacac |
| | | gacaacttccctctcacgttcggccagggaaccaagctggaaatcaag |
| 149362-aa VH | 444 | QVQLQESGPGLVKPSETLSLTCTVSGGSISSSYYYWGWIRQPPGKGLE |
| | | WIGSIYYSGSAYYNPSLKSRVTISVDTSKNQFSLRLSSVTAADTAVYYCA |
| | | RHWQEWPDAFDIWGQGTMVTVSS |
| 149362-aa VL | 445 | ETTLTQSPAFMSATPGDKVIISCKASQDIDDAMNWYQQKPGEAPLFIIQS |
| | | ATSPVPGIPPRFSGSGFGTDFSLTINNIESEDAAYYFCLQHDNFPLTFGQ |
| | | GTKLEIK |

149363

| | | |
|---|---|---|
| 149363-aa | 446 | QVNLRESGPALVKPTQTLTLTCTFSGFSLRTSGMCVSWIRQPPGKALEW |
| ScFv domain | | LARIDWDEDKFYSTSLKTRLTISKDTSDNQVVLRMTNMDPADTATYYCA |
| | | RSGAGGTSATAFDIWGPGTMVTVSSGGGGSGGGGSGGGGSDIQMTQS |
| | | PSSLSASVGDRVTITCRASQDIYNNLAWFQLKPGSAPRSLMYAANKSQS |
| | | GVPSRFSGSASGTDFTLTISSLQPEDFATYYCQHYYRFPYSFGQGTKLEI |
| | | K |
| 149363-nt | 447 | caagtcaatctgcgcgaatccggccccgccttggtcaagcctacccagaccctcactctgacctgtact |
| ScFv domain | | ttctccggcttctccctgcggacttccgggatgtgcgtgtcctggatcagacagcctccgggaaaggcc |
| | | ctggagtggctcgctcgcattgactgggatgaggacaagttctactccacctcactcaagaccaggctg |
| | | accatcagcaaagatacctctgacaaccaagtggtgctccgcatgaccaacatggacccagccgac |
| | | actgccacttactactgcgcgaggagcggagcgggcggaacctccgccaccgccttcgatatttggg |
| | | gcccgggtaccatggtcaccgtgtcaagcggaggaggggggtccgggggcggcggttccggggga |
| | | ggcggatcggacattcagatgactcagtcaccatcgtccctgagcgctagcgtgggcgacagagtga |
| | | caatcacttgccgggcatcccaggacatctataacaaccttgcgtggttccagctgaagcctggttccg |
| | | caccgcggtcacttatgtacgccgccaacaagagccagtcgggagtgccgtcccggttttccggttcg |
| | | gcctcgggaactgacttcaccctgacgatctccagcctgcaacccgaggatttcgccacctactactgc |
| | | cagcactactaccgctttccctactcgttcggacagggaaccaagctggaaatcaag |
| 149363-aa VH | 448 | QVNLRESGPALVKPTQTLTLTCTFSGFSLRTSGMCVSWIRQPPGKALEW |
| | | LARIDWDEDKFYSTSLKTRLTISKDTSDNQVVLRMTNMDPADTATYYCA |
| | | RSGAGGTSATAFDIWGPGTMVTVSS |
| 149363-aa VL | 449 | DIQMTQSPSSLSASVGDRVTITCRASQDIYNNLAWFQLKPGSAPRSLMY |
| | | AANKSQSGVPSRFSGSASGTDFTLTISSLQPEDFATYYCQHYYRFPYSF |
| | | GQGTKLEIK |

149364

| | | |
|---|---|---|
| 149364-aa | 450 | evqlvesggglvkpggslrlscaasgifissysmnwvrqapgkglewvssisssssyiyyadsvkgrft |
| ScFv domain | | isrdnaknslylqmnslraedtavyycaktiaavyafdiwgqgttvtvssggggsggggsggggseivl |
| | | tqsplslpvtpeepasiscrssqsllhsngynyldwylqkpgqspqlliylgsnrasgvpdrfsgsgsgtd |
| | | ftlkisrveaedvgvyycrnqalqtpytfgqgtkleik |
| 149364-nt | 451 | gaagtgcagcttgtcgaatccggggggggactggtcaagccgggcggatcactgagactgtcctgcg |
| ScFv domain | | ccgcgagcggcttcacgttctcctcctactccatgaactgggtccgccaagcccccgggaagggactg |
| | | gaatgggtgtcctctatctcctcgtcgtcgtcctacatctactacgccgactccgtgaagggaagattcac |
| | | catttcccgcgacaacgcaaagaactcactgtacttgcaaatgaactcactccgggccgaagatactg |
| | | ctgtgtactattgcgccaagactattgccgccgtctacgctttcgacatctggggccagggaaccaccgt |
| | | gactgtgtcgtccggtggtggtggctcgggcggaggaggaagcggcggcggggggtccgagattgt |
| | | gctgacccagtcgccactgagcctccctgtgacccccgaggaacccgccagcatcagctgccggtcc |
| | | agccagtccctgctccactccaacggatacaattacctcgattggtaccttcagaagcctggacaaag |
| | | cccgcagctgctcatctacttgggatcaaaccgcgcgtcaggagtgcctgaccggttctccggctcgg |
| | | gcagcggtaccgatttcaccctgaaaatctccagggtggaggcagaggacgtgggagtgtattactgt |
| | | atgcaggcgctgcagactccgtacacatttgggcagggcaccaagctggagatcaag |
| 149364-aa VH | 452 | EVQLVESGGGLVKPGGSLRLSCAASGFTFSSYSMNWVRQAPGKGLEW |
| | | VSSISSSSSYIYYADSVKGRFTISRDNAKNSLYLQMNSLRAEDTAVYYCA |
| | | KTIAAVYAFDIWGQGTTVTVSS |
| 149364-aa VL | 453 | EIVLTQSPLSLPVTPEEPASISCRSSQSLLHSNGYNYLDWYLQKPGQSPQ |
| | | LLIYLGSNRASGVPDRFSGSGSGTDFTLKISRVEAEDVGVYYCMQALQT |
| | | PYTFGQGTKLEIK |

149365

| | | |
|---|---|---|
| 149365-aa | 454 | evqlvesggglvkpggslrlscaasgftfsdyymswirqapgkglewvsyisssgstiyyadsvkgrfti |
| ScFv domain | | srdnaknslylqmnslraedtavyycardlrgafdiwgqgtmvtvssggggsggggsggggssyvlt |
| | | qspsysaapgytatiscggnnigtksvhwyqqkpgqapllvirddsvrpskipgrfsgsnsgnmatlti |
| | | sgvqagdeadfycqvwdsdsehvvfgggtkltvl |
| 149365-nt | 455 | gaagtccagctcgtggagtccggcggaggccttgtg aagcctgg aggttcgctgagactgtcctgcgc |
| ScFv domain | | cgcctccggcttcaccttctccgactactacatgtcctggatcagacaggccccgggaaagggcctgg |
| | | aatgggtgtcctacatctcgtcatcgggcagcactatctactacgcggactcagtgaaggggcggttca |
| | | ccatttcccgggataacgcgaagaactcgctgtatctgcaaatgaactcactgagggccgaggacac |
| | | cgccgtgtactactgcgcccgcgatctccgcggggcatttgacatctggggacagggaaccatggtca |
| | | cagtgtccagcggagggggaggatcgggtggcggaggttccgggggtggaggctcctcctacgtgct |
| | | gactcagagcccaagcgtcagcgctgcgcccggttacacggcaaccatctcctgtggcggaaacaa |
| | | cattgggaccaagtctgtgcactggtatcagcagaagccgggccaagctcccctgttggtgatccgcg |
| | | atgactccgtgcggcctagcaaaattccgggacggttctccggctccaacagcggcaatatggccact |
| | | ctcaccatctcgggagtgcaggccggagatgaagccgacttctactgccaagtctgggactcagactc |
| | | cgagcatgtggtgttcgggggcggaaccaagctgactgtgctc |
| 149365-aa VH | 456 | EVQLVESGGGLVKPGGSLRLSCAASGFTFSDYYMSWIRQAPGKGLEWV |
| | | SYISSSGSTIYYADSVKGRFTISRDNAKNSLYLQMNSLRAEDTAVYYCAR |
| | | DLRGAFDIWGQGTMVTVSS |
| 149365-aa VL | 457 | SYVLTQSPSVSAAPGYTATISCGGNNIGTKSVHWYQQKPGQAPLLVIRD |
| | | DSVRPSKIPGRFSGSNSGNMATLTISGVQAGDEADFYCQVWDSDSEHV |
| | | VFGGGTKLTVL |

149366

| | | |
|---|---|---|
| 149366-aa | 458 | qvqlvqsgaevkkpgasvkvsckpsgytvtshyihwyrrapgqglewmgminpsggvtaysqtlqg |
| ScFv domain | | rvtmtsdtssstvymelsslrsedtamyycaregsgsgwyfdfwgrgtivtvssggggsggggsggg |
| | | gssyvltqppsysyspgqtasitcsgdglskkyvswyqqkagqspvvlisrdkerpsgipdrfsgsns |
| | | adtatltisgtqamdeadyycqawddttvvfgggtkltvl |
| 149366-nt | 459 | caagtgcagctggtgcagagcggggccgaagtcaagaagccgggagcctccgtgaaagtgtcctg |
| ScFv domain | | caagccttcgggatacaccgtg acctcccactacattcattgggtccgccgcgcccccggccaagga |
| | | ctcgagtggatgggcatgatcaaccctagcggcggagtgaccgcgtacagccagacgctgcaggg |
| | | acgcgtgactatgacctcggatacctcctcctccaccgtctatatggaactgtccagcctgcggtccgag |
| | | gataccgccatgtactactgcgcccgggaaggatcaggctccgggtggtatttcgacttctggggaag |
| | | aggcaccctcgtgactgtgtcatctgggggagggggttccggtggtggcggatcgggaggaggcggt |
| | | tcatcctacgtgctgacccagccaccctccgtgtccgtgagccccggccagactgcatcgattacatgt |
| | | agcggcgacggcctctccaagaaatacgtgtcgtggtaccagcagaaggccggacagagcccggt |
| | | ggtgctgatctcaagagataaggagcggcctagcggaatcccggacaggttctcgggttccaactcc |
| | | gcggacactgctactctgaccatctcggggacccaggctatggacgaagccgattactactgccaag |
| | | cctgggacgacactactgtcgtgtttggagggggcaccaagttgaccgtcctt |
| 149366-aa VH | 460 | QVQLVQSGAEVKKPGASVKVSCKPSGYTVTSHYIHWVRRAPGQGLEW |
| | | MGMINPSGGVTAYSQTLQGRVTMTSDTSSSTVYMELSSLRSEDTAMYY |
| | | CAREGSGSGWYFDFWGRGTLVTVSS |
| 149366-aa VL | 461 | SYVLTQPPSVSVSPGQTASITCSGDGLSKKYVSWYQQKAGQSPVVLISR |
| | | DKERPSGIPDRFSGSNSADTATLTISGTQAMDEADYYCQAWDDTTVVFG |
| | | GGTKLTVL |

149367

| | | |
|---|---|---|
| 149367-aa | 462 | QVQLQESGPGLVKPSQTLSLTCTVSGGSISSGGYYWSWIRQHPGKGLE |
| ScFv domain | | WIGYIYYSGSTYYNPSLKSRVTISVDTSKNQFSLKLSSVTAADTAVYYCA |
| | | RAGIAARLRGAFDIWGQGTMVTVSSGGGGSGGGGSGGGGSDIVMTQS |
| | | PSSVSASVGDRVIITCRASQGIRNWLAWYQQKPGKAPNLLIYAASNLQS |
| | | GVPSRFSGSGSGADFTLTISSLQPEDVATYYCQKYNSAPFTFGPGTKVDI |
| | | K |
| 149367-nt | 463 | caagtgcagcttcaggagagcggcccgggactcgtgaagccgtcccagaccctgtccctgacttgca |
| ScFv domain | | ccgtgtcgggaggaagcatctcgagcggaggctactattggtcgtggattcggcagcaccctggaaa |
| | | gggcctggaatggatcggctacatctactactccggctcgacctactacaacccatcgctgaagtcca |
| | | gagtgacaatctcagtggacacgtccaagaatcagttcagcctgaagctctcttccgtgactgcggccg |
| | | acaccgccgtgtactactgcgcacgcgctggaattgccgcccggctgaggggtgccttcgacatttgg |
| | | ggacagggcaccatggtcaccgtgtcctccggcggcggaggttccgggggtggaggctcaggagg |
| | | aggggggtccgacatcgtcatgactcagtcgccctcaagcgtcagcgcgtccgtcggggacagagtg |
| | | atcatcacctgtcgggcgtcccaggg aattcgcaactggctggcctggtatcagcagaagcccggaa |
| | | aggcccccaacctgttgatctacgccgcctcaaacctccaatccggggtgccgagccgcttcagcgg |
| | | ctccggttcgggtgccgatttcactctgaccatctcctccctgcaacctgaagatgtggctacctactactg |
| | | ccaaaagtacaactccgcaccttttactttcggaccggggaccaaagtggacattaag |
| 149367-aa VH | 464 | QVQLQESGPGLVKPSQTLSLTCTVSGGSISSGGYYWSWIRQHPGKGLE |
| | | WIGYIYYSGSTYYNPSLKSRVTISVDTSKNQFSLKLSSVTAADTAVYYCA |
| | | RAGIAARLRGAFDIWGQGTMVTVSS |
| 149367-aa VL | 465 | DIVMTQSPSSVSASVGDRVIITCRASQGIRNWLAWYQQKPGKAPNLLIYA |
| | | ASNLQSGVPSRFSGSGSGADFTLTISSLQPEDVATYYCQKYNSAPFTFG |
| | | PGTKVDIK |

149368

| | | |
|---|---|---|
| 149368-aa | 466 | qvqlvqsgaevkkpgssvkvsckasggtfssyaiswvrqapgqglewmggiipifgtanyaqkfqgr |
| ScFv domain | | vtitadeststaymelsslrsedtavyycarrggyqllrwdvgllrsafdiwgqgtmvtvssggggsggg |
| | | gsggggssyvltqppsysvapgqtaritcggnnigsksvhwyqqkpgqapvIvlygknnrpsgvpdr |
| | | fsgsrsgttasltitgaqaedeadyycssrdssgdhlrvfgtgtkvtvl |
| 149368-nt | 467 | caagtgcagctggtccagtcgggcgccgaggtcaagaagcccgggagctctgtgaaagtgtcctgc |
| ScFv domain | | aaggcctccgggggcacctttagctcctacgccatctcctgggtccgccaagcaccgggtcaaggcct |
| | | ggagtggatggggggaattatccctatcttcggcactgccaactacgcccagaagttccagggacgc |
| | | gtgaccattaccgcggacgaatccacctccaccgcttatatggagctgtccagcttgcgctcggaagat |
| | | accgccgtgtactactgcgcccggaggggtggataccagctgctgagatgggacgtgggcctcctgc |
| | | ggtcggcgttcgacatctggggccagggcactatggtcactgtgtccagcggaggaggcggatcggg |
| | | aggcggcggatcagggggaggcggttccagctacgtgcttactcaacccccttcggtgtccgtggccc |
| | | cgggacagaccgccagaatcacttgcggaggaaacaacattgggtccaagagcgtgcattggtacc |
| | | agcagaagccaggacaggcccctgtgctggtgctctacgggaagaacaatcggcccagcggagtg |
| | | ccggacaggttctcgggttcacgctccggtacaaccgcttcactgactatcaccggggcccaggcag |
| | | aggatgaagcggactactactgttcctcccgggattcatccggcgaccacctccgggtgttcggaacc |
| | | ggaacgaaggtcaccgtgctg |
| 149368-aa VH | 468 | QVQLVQSGAEVKKPGSSVKVSCKASGGTFSSYAISWVRQAPGQGLEW |
| | | MGGIIPIFGTANYAQKFQGRVTITADESTSTAYMELSSLRSEDTAVYYCA |
| | | RRGGYQLLRWDVGLLRSAFDIWGQGTMVTVSS |
| 149368-aa VL | 469 | SYVLTQPPSVSVAPGQTARITCGGNNIGSKSVHWYQQKPGQAPVLVLY |
| | | GKNNRPSGVPDRFSGSRSGTTASLTITGAQAEDEADYYCSSRDSSGDH |
| | | LRVFGTGTKVTVL |

149369

| | | |
|---|---|---|
| 149369-aa | 470 | evqlqqsgpglvkpsqtlsltcaisgdsyssnsaawnwirqspsrglewlgrtyyrskwysfyaislksrii |
| ScFv domain | | inpdtsknqfslqlksvtpedtavyycarsspeglflywfdpwgqgtivtvssggdgsggggsggggss |
| | | seltqdpaysvalgqtiritcqgdslgnyyatwyqqkpgqapvlviygtnnrpsgipdrfsasssgntasl |
| | | titgaqaedeadyycnsrdssghhllfgtgtkvtvl |
| 149369-nt | 471 | gaagtgcagctccaacagtcaggaccggggctcgtgaagccatcccagaccctgtccctgacttgtg |
| ScFv domain | | ccatctcgggagatagcgtgtcatcgaactccgccgcctggaactggattcggcagagcccgtcccg |
| | | cggactggagtggcttggaaggacctactaccggtccaagtggtactctttctacgcgatctcgctgaa |
| | | gtcccgcattatcattaaccctgatacctccaagaatcagttctccctccaactgaaatccgtcaccccc |
| | | gaggacacagcagtgtattactgcgcacggagcagccccgaaggactgttcctgtattggtttgaccc |
| | | ctggggccaggggactcttgtgaccgtgtcgagcggcggagatgggtccggtggcggtggttcgggg |
| | | ggcggcggatcatcatccgaactgacccaggacccggctgtgtccgtggcgctgggacaaaccatc |
| | | cgcattacgtgccagggagactccctgggcaactactacgccacttggtaccagcagaagccgggc |
| | | caagcccctgtgttggtcatctacgggaccaacaacag accttccggcatccccgaccggttcagcgc |
| | | ttcgtcctccggcaacactgccagcctgaccatcactggagcgcaggccgaagatgaggccgacta |
| | | ctactgcaacagcagagactcctcgggtcatcacctcttgttcggaactggaaccaaggtcaccgtgct |
| | | g |
| 149369-aa VH | 472 | EVQLQQSGPGLVKPSQTLSLTCAISGDSVSSNSAAWNWIRQSPSRGLE |
| | | WLGRTYYRSKWYSFYAISLKSRIIINPDTSKNQFSLQLKSVTPEDTAVYYC |
| | | ARSSPEGLFLYWFDPWGQGTLVTVSS |
| 149369-aa VL | 473 | SSELTQDPAVSVALGQTIRITCQGDSLGNYYATWYQQKPGQAPVLVIYG |
| | | TNNRPSGIPDRFSASSSGNTASLTITGAQAEDEADYYCNSRDSSGHHLL |
| | | FGTGTKVTVL |

BCMA_EBB-C1978-A4

| | | |
|---|---|---|
| BCMA_EBB- | 474 | EVQLVESGGGLVQPGGSLRLSCAASGFTFSSYAMSWVRQAPGKGLEW |
| C1978-A4-aa | | VSAISGSGGSTYYADSVKGRFTISRDNSKNTLYLQMNSLRAEDTAVYYC |
| ScFv domain | | AKVEGSGSLDYWGQGTLVTVSSGGGGSGGGGSGGGGSEIVMTQSPGT |
| | | LSLSPGERATLSCRASQSVSSAYLAWYQQKPGQPPRLLISGASTRATGI |
| | | PDRFGGSGSGTDFTLTISRLEPEDFAVYYCQHYGSSFNGSSLFTFGQGT |
| | | RLEIK |
| BCMA_EBB- | 475 | GAAGTGCAGCTCGTGGAGTCAGGAGGCGGCCTGGTCCAGCCGGGA |
| C1978-A4-nt | | GGGTCCCTTAGACTGTCATGCGCCGCAAGCGGATTCACTTTCTCCTC |
| ScFv domain | | CTATGCCATGAGCTGGGTCCGCCAAGCCCCCGGAAAGGGACTGGAA |
| | | TGGGTGTCCGCCATCTCGGGGTCTGGAGGCTCAACTTACTACGCTGA |
| | | CTCCGTGAAGGGACGGTTCACCATTAGCCGCGACAACTCCAAGAACA |
| | | CCCTCTACCTCCAAATGAACTCCCTGCGGGCCGAGGATACCGCCGTC |
| | | TACTACTGCGCCAAAGTGGAAGGTTCAGGATCGCTGGACTACTGGGG |
| | | ACAGGGTACTCTCGTGACCGTGTCATCGGGCGGAGGAGGTTCCGGC |
| | | GGTGGCGGCTCCGGCGGCGGAGGGTCGGAGATCGTGATGACCCAG |
| | | AGCCCTGGTACTCTGAGCCTTTCGCCGGGAGAAAGGGCCACCCTGT |
| | | CCTGCCGCGCTTCCCAATCCGTGTCCTCCGCGTACTTGGCGTGGTAC |
| | | CAGCAGAAGCCGGGACAGCCCCCTCGGCTGCTGATCAGCGGGGCC |
| | | AGCACCCGGGCAACCGGAATCCCAGACAGATTCGGGGGTTCCGGCA |
| | | GCGGCACAGATTTCACCCTGACTATTTCGAGGTTGGAGCCCGAGGAC |
| | | TTTGCGGTGTATTACTGTCAGCACTACGGGTCGTCCTTTAATGGCTCC |
| | | AGCCTGTTCACGTTCGGACAGGGGACCCGCCTGGAAATCAAG |
| BCMA_EBB- | 476 | EVQLVESGGGLVQPGGSLRLSCAASGFTFSSYAMSWVRQAPGKGLEW |
| C1978-A4-aa | | VSAISGSGGSTYYADSVKGRFTISRDNSKNTLYLQMNSLRAEDTAVYYC |
| VH | | AKVEGSGSLDYWGQGTLVTVSS |
| BCMA_EBB- | 477 | EIVMTQSPGTLSLSPGERATLSCRASQSVSSAYLAWYQQKPGQPPRLLI |
| C1978-A4-aa | | SGASTRATGIPDRFGGSGSGTDFTLTISRLEPEDFAVYYCQHYGSSFNG |
| VL | | SSLFTFGQGTRLEIK |

BCMA_EBB-C1978-G1

| | | |
|---|---|---|
| BCMA_EBB- | 478 | EVQLVETGGGLVQPGGSLRLSCAASGITFSRYPMSWVRQAPGKGLEWV |
| C1978-G1-aa | | SGISDSGVSTYYADSAKGRFTISRDNSKNTLFLQMSSLRDEDTAVYYCVT |
| ScFv domain | | RAGSEASDIWGQGTMVTVSSGGGGSGGGGSGGGGSEIVLTQSPATLSL |
| | | SPGERATLSCRASQSVSNSLAWYQQKPGQAPRLLIYDASSRATGIPDRF |
| | | SGSGSGTDFTLTISRLEPEDFAIYYCQQFGTSSGLTFGGGTKLEIK |
| BCMA_EBB- | 479 | GAAGTGCAACTGGTGGAAACCGGTGGCGGCCTGGTGCAGCCTGGAG |
| C1978-G1-nt | | GATCATTGAGGCTGTCATGCGCGGCCAGCGGTATTACCTTCTCCCGG |
| ScFv domain | | TACCCCATGTCCTGGGTCAGACAGGCCCCGGGGAAAGGGCTTGAAT |
| | | GGGTGTCCGGGATCTCGGACTCCGGTGTCAGCACTTACTACGCCGA |
| | | CTCCGCCAAGGGACGCTTCACCATTTCCCGGGACAACTCGAAGAACA |
| | | CCCTGTTCCTCCAAATGAGCTCCCTCCGGGACGAGGATACTGCAGTG |
| | | TACTACTGCGTGACCCGCGCCGGGTCCGAGGCGTCTGACATTTGGG |
| | | GACAGGGCACTATGGTCACCGTGTCGTCCGGCGGAGGGGGCTCGG |
| | | GAGGCGGTGGCAGCGGAGGAGGAGGGTCCGAGATCGTGCTGACCC |
| | | AATCCCCGGCCACCCTCTCGCTGAGCCCTGGAGAAAGGGCAACCTT |
| | | GTCCTGTCGCGCGAGCCAGTCCGTGAGCAACTCCCTGGCCTGGTAC |
| | | CAGCAGAAGCCCGGACAGGCTCCGAGACTTCTGATCTACGACGCTTC |
| | | GAGCCGGGCCACTGGAATCCCCGACCGCTTTTCGGGGTCCGGCTCA |
| | | GGAACCGATTTCACCCTGACAATCTCACGGCTGGAGCCAGAGGATTT |
| | | CGCCATCTATTACTGCCAGCAGTTCGGTACTTCCTCCGGCCTGACTTT |
| | | CGGAGGCGGCACGAAGCTCGAAATCAAG |
| BCMA_EBB- | 480 | EVQLVETGGGLVQPGGSLRLSCAASGITFSRYPMSWVRQAPGKGLEWV |
| C1978-G1-aa | | SGISDSGVSTYYADSAKGRFTISRDNSKNTLFLQMSSLRDEDTAVYYCVT |
| VH | | RAGSEASDIWGQGTMVTVSS |
| BCMA_EBB- | 481 | EIVLTQSPATLSLSPGERATLSCRASQSVSNSLAWYQQKPGQAPRLLIYD |
| C1978-G1-aa | | ASSRATGIPDRFSGSGSGTDFTLTISRLEPEDFAIYYCQQFGTSSGLTFG |
| VL | | GGTKLEIK |

BCMA_EBB-C1979-C1

| | | |
|---|---|---|
| BCMA_EBB- | 482 | QVQLVESGGGLVQPGGSLRLSCAASGFTFSSYAMSWVRQAPGKGLEW |
| C1979-C1-aa | | VSAISGSGGSTYYADSVKGRFTISRDNAKNSLYLQMNSLRAEDTAIYYCA |
| ScFv domain | | RATYKRELRYYYGMDVWGQGTMVTVSSGGGGSGGGGSGGGGSEIVM |
| | | TQSPGTVSLSPGERATLSCRASQSVSSSFLAWYQQKPGQAPRLLIYGAS |
| | | SRATGIPDRFSGSGSGTDFTLTISRLEPEDSAVYYCQQYHSSPSWTFGQ |
| | | GTRLEIK |
| BCMA_EBB- | 483 | CAAGTGCAGCTCGTGGAATCGGGTGGCGGACTGGTGCAGCCGGGG |
| C1979-C1-nt | | GGCTCACTTAGACTGTCCTGCGCGGCCAGCGGATTCACTTTCTCCTC |
| ScFv domain | | CTACGCCATGTCCTGGGTCAGACAGGCCCCTGGAAAGGGCCTGGAA |
| | | TGGGTGTCCGCAATCAGCGGCAGCGGCGGCTCGACCTATTACGCGG |
| | | ATTCAGTGAAGGGCAGATTCACCATTTCCCGGGACAACGCCAAGAAC |
| | | TCCTTGTACCTTCAAATGAACTCCCTCCGCGCGGAAGATACCGCAAT |
| | | CTACTACTGCGCTCGGGCCACTTACAAGAGGGAACTGCGCTACTACT |
| | | ACGGGATGGACGTCTGGGGCCAGGGAACCATGGTCACCGTGTCCAG |
| | | CGGAGGAGGAGGATCGGGAGGAGGCGGTAGCGGGGGTGGAGGGT |
| | | CGGAGATCGTGATGACCCAGTCCCCCGGCACTGTGTCGCTGTCCCC |
| | | CGGCGAACGGGCCACCCTGTCATGTCGGGCCAGCCAGTCAGTGTCG |
| | | TCAAGCTTCCTCGCCTGGTACCAGCAGAAACCGGGACAAGCTCCCC |
| | | GCCTGCTGATCTACGGAGCCAGCAGCCGGGCCACCGGTATTCCTGA |
| | | CCGGTTCTCCGGTTCGGGGTCCGGGACCGACTTTACTCTGACTATCT |
| | | CTCGCCTCGAGCCAGAGGACTCCGCCGTGTATTACTGCCAGCAGTAC |
| | | CACTCCTCCCCGTCCTGGACGTTCGGACAGGGCACAAGGCTGGAGA |
| | | TTAAG |
| BCMA_EBB- | 484 | QVQLVESGGGLVQPGGSLRLSCAASGFTFSSYAMSWVRQAPGKGLEW |
| C1979-C1-aa | | VSAISGSGGSTYYADSVKGRFTISRDNAKNSLYLQMNSLRAEDTAIYYCA |
| VH | | RATYKRELRYYYGMDVWGQGTMVTVSS |
| BCMA_EBB- | 485 | EIVMTQSPGTVSLSPGERATLSCRASQSVSSSFLAWYQQKPGQAPRLLI |
| C1979-C1-aa | | YGASSRATGIPDRFSGSGSGTDFTLTISRLEPEDSAVYYCQQYHSSPSW |
| VL | | TFGQGTRLEIK |

BCMA_EBB-C1978-C7

| | | |
|---|---|---|
| BCMA_EBB- | 486 | EVQLVETGGGLVQPGGSLRLSCAASGFTFSSYAMSWVRQAPGKGLEW |
| C1978-C7-aa | | VSAISGSGGSTYYADSVKGRFTISRDNSKNTLYLQMNTLKAEDTAVYYCA |
| ScFv domain | | RATYKRELRYYYGMDVWGQGTTVTVSSGGGGSGGGGSGGGGSEIVLT |
| | | QSPSTLSLSPGESATLSCRASQSVSTTFLAWYQQKPGQAPRLLIYGSSN |
| | | RATGIPDRFSGSGSGTDFTLTIRRLEPEDFAVYYCQQYHSSPSWTFGQG |
| | | TKVEIK |
| BCMA_EBB- | 487 | GAGGTGCAGCTTGTGGAAACCGGTGGCGGACTGGTGCAGCCCGGA |
| C1978-C7-nt | | GGAAGCCTCAGGCTGTCCTGCGCCGCGTCCGGCTTCACCTTCTCCT |
| ScFv domain | | CGTACGCCATGTCCTGGGTCCGCCAGGCCCCCGGAAAGGGCCTGGA |
| | | ATGGGTGTCCGCCATCTCTGGAAGCGGAGGTTCCACGTACTACGCG |
| | | GACAGCGTCAAGGGAAGGTTCACAATCTCCCGCGATAATTCGAAGAA |
| | | CACTCTGTACCTTCAAATGAACACCCTGAAGGCCGAGGACACTGCTG |
| | | TGTACTACTGCGCACGGGCCACCTACAAGAGAGAGCTCCGGTACTAC |
| | | TACGGAATGGACGTCTGGGGCCAGGGAACTACTGTGACCGTGTCCT |
| | | CGGGAGGGGGTGGCTCCGGGGGGGGCGGCTCCGGCGGAGGCGGT |
| | | TCCGAGATTGTGCTGACCCAGTCACCTTCAACTCTGTCGCTGTCCCC |
| | | GGGAGAGAGCGCTACTCTGAGCTGCCGGGCCAGCCAGTCCGTGTCC |
| | | ACCACCTTCCTCGCCTGGTATCAGCAGAAGCCGGGGCAGGCACCAC |
| | | GGCTCTTGATCTACGGGTCAAGCAACAGAGCGACCGGAATTCCTGAC |
| | | CGCTTCTCGGGGAGCGGTTCAGGCACCGACTTCACCCTGACTATCC |
| | | GGCGCCTGGAACCCGAAGATTTCGCCGTGTATTACTGTCAACAGTAC |
| | | CACTCCTCGCCGTCCTGGACCTTTGGCCAAGGAACCAAAGTGGAAAT |
| | | CAAG |
| BCMA_EBB- | 488 | EVQLVETGGGLVQPGGSLRLSCAASGFTFSSYAMSWVRQAPGKGLEW |
| C1978-C7-aa | | VSAISGSGGSTYYADSVKGRFTISRDNSKNTLYLQMNTLKAEDTAVYYCA |
| VH | | RATYKRELRYYYGMDVWGQGTTVTVSS |
| BCMA_EBB- | 489 | EIVLTQSPSTLSLSPGESATLSCRASQSVSTTFLAWYQQKPGQAPRLLIY |
| C1978-C7-aa | | GSSNRATGIPDRFSGSGSGTDFTLTIRRLEPEDFAVYYCQQYHSSPSWT |
| VL | | FGQGTKVEIK |

BCMA_EBB-C1978-D10

| | | |
|---|---|---|
| BCMA_EBB- | 490 | EVQLVETGGGLVQPGRSLRLSCAASGFTFDDYAMHWVRQAPGKGLEW |
| C1978-D10-aa | | VSGISWNSGSIGYADSVKGRFTISRDNAKNSLYLQMNSLRDEDTAVYYC |
| ScFv domain | | ARVGKAVPDVWGQGTTVTVSSGGGGSGGGGSGGGGSDIVMTQTPSSL |
| | | SASVGDRVTITCRASQSISSYLNWYQQKPGKAPKLLIYAASSLQSGVPSR |
| | | FSGSGSGTDFTLTISSLQPEDFATYYCQQSYSTPYSFGQGTRLEIK |
| BCMA_EBB- | 491 | GAAGTGCAGCTCGTGGAAACTGGAGGTGGACTCGTGCAGCCTGGAC |
| C1978-D10-nt | | GGTCGCTGCGGCTGAGCTGCGCTGCATCCGGCTTCACCTTCGACGA |
| ScFv domain | | TTATGCCATGCACTGGGTCAGACAGGCGCCAGGGAAGGGACTTGAG |
| | | TGGGTGTCCGGTATCAGCTGGAATAGCGGCTCAATCGGATACGCGG |
| | | ACTCCGTGAAGGGAAGGTTCACCATTTCCCGCGACAACGCCAAGAAC |
| | | TCCCTGTACTTGCAAATGAACAGCCTCCGGGATGAGGACACTGCCGT |
| | | GTACTACTGCGCCCGCGTCGGAAAAGCTGTGCCCGACGTCTGGGGC |
| | | CAGGGAACCACTGTGACCGTGTCCAGCGGCGGGGGTGGATCGGGC |
| | | GGTGGAGGGTCCGGTGGAGGGGGCTCAGATATTGTGATGACCCAGA |
| | | CCCCCTCGTCCCTGTCCGCCTCGGTCGGCGACCGCGTGACTATCAC |
| | | ATGTAGAGCCTCGCAGAGCATCTCCAGCTACCTGAACTGGTATCAGC |
| | | AGAAGCCGGGGAAGGCCCCGAAGCTCCTGATCTACGCGGCATCATC |
| | | ACTGCAATCGGGAGTGCCGAGCCGGTTTTCCGGGTCCGGCTCCGGC |
| | | ACCGACTTCACGCTGACCATTTCTTCCCTGCAACCCGAGGACTTCGC |
| | | CACTTACTACTGCCAGCAGTCCTACTCCACCCCTTACTCCTTCGGCCA |
| | | AGGAACCAGGCTGGAAATCAAG |
| BCMA_EBB- | 492 | EVQLVETGGGLVQPGRSLRLSCAASGFTFDDYAMHWVRQAPGKGLEW |
| C1978-D10-aa | | VSGISWNSGSIGYADSVKGRFTISRDNAKNSLYLQMNSLRDEDTAVYYC |
| VH | | ARVGKAVPDVWGQGTTVTVSS |
| BCMA_EBB- | 493 | DIVMTQTPSSLSASVGDRVTITCRASQSISSYLNWYQQKPGKAPKLLIYA |
| C1978-D10-aa | | ASSLQSGVPSRFSGSGSGTDFTLTISSLQPEDFATYYCQQSYSTPYSFG |
| VL | | QGTRLEIK |

BCMA_EBB-C1979-C12

| | | |
|---|---|---|
| BCMA_EBB- | 494 | EVQLVESGGGLVQPGRSLRLSCTASGFTFDDYAMHWVRQRPGKGLEW |
| C1979-C12-aa | | VASINWKGNSLAYGDSVKGRFAISRDNAKNTVFLQMNSLRTEDTAVYYC |
| ScFv domain | | ASHQGVAYYNYAMDVWGRGTLVTVSSGGGGSGGGGSGGGGSEIVLTQ |
| | | SPGTLSLSPGERATLSCRATQSIGSSFLAWYQQRPGQAPRLLIYGASQR |
| | | ATGIPDRFSGRGSGTDFTLTISRVEPEDSAVYYCQHYESSPSWTFGQGT |
| | | KVEIK |
| BCMA_EBB- | 495 | GAAGTGCAGCTCGTGGAGAGCGGGGGAGGATTGGTGCAGCCCGGA |
| C1979-C12-nt | | AGGTCCCTGCGGCTCTCCTGCACTGCGTCTGGCTTCACCTTCGACGA |
| ScFv domain | | CTACGCGATGCACTGGGTCAGACAGCGCCCGGGAAAGGGCCTGGAA |
| | | TGGGTCGCCTCAATCAACTGGAAGGGAAACTCCCTGGCCTATGGCGA |
| | | CAGCGTGAAGGGCCGCTTCGCCATTTCGCGCGACAACGCCAAGAAC |
| | | ACCGTGTTTCTGCAAATGAATTCCCTGCGGACCGAGGATACCGCTGT |
| | | GTACTACTGCGCCAGCCACCAGGGCGTGGCATACTATAACTACGCCA |
| | | TGGACGTGTGGGGAAGAGGGACGCTCGTCACCGTGTCCTCCGGGG |
| | | GCGGTGGATCGGGTGGAGGAGGAAGCGGTGGCGGGGGCAGCGAAA |
| | | TCGTGCTGACTCAGAGCCCGGGAACTCTTTCACTGTCCCCGGGAGAA |
| | | CGGGCCACTCTCTCGTGCCGGGCCACCCAGTCCATCGGCTCCTCCT |
| | | TCCTTGCCTGGTACCAGCAGAGGCCAGGACAGGCGCCCCGCCTGCT |
| | | GATCTACGGTGCTTCCCAACGCGCCACTGGCATTCCTGACCGGTTCA |
| | | GCGGCAGAGGGTCGGGAACCGATTTCACACTGACCATTTCCCGGGT |
| | | GGAGCCCGAAGATTCGGCAGTCTACTACTGTCAGCATTACGAGTCCT |
| | | CCCCTTCATGGACCTTCGGTCAAGGGACCAAAGTGGAGATCAAG |
| BCMA_EBB- | 496 | EVQLVESGGGLVQPGRSLRLSCTASGFTFDDYAMHWVRQRPGKGLEW |
| C1979-C12-aa | | VASINWKGNSLAYGDSVKGRFAISRDNAKNTVFLQMNSLRTEDTAVYYC |
| VH | | ASHQGVAYYNYAMDVWGRGTLVTVSS |
| BCMA_EBB- | 497 | EIVLTQSPGTLSLSPGERATLSCRATQSIGSSFLAWYQQRPGQAPRLLIY |
| C1979-C12-aa | | GASQRATGIPDRFSGRGSGTDFTLTISRVEPEDSAVYYCQHYESSPSWT |
| VL | | FGQGTKVEIK |

BCMA_EBB-C1980-G4

| | | |
|---|---|---|
| BCMA_EBB- | 498 | EVQLVESGGGLVQPGGSLRLSCAASGFTFSSYAMSWVRQAPGKGLEW |
| C1980-G4-aa | | VSAISGSGGSTYYADSVKGRFTISRDNSKNTLYLQMNSLRAEDTAVYYC |
| ScFv domain | | AKVVRDGMDVWGQGTTVTVSSGGGGSGGGGSGGGGSEIVLTQSPATL |
| | | SLSPGERATLSCRASQSVSSSYLAWYQQKPGQAPRLLIYGASSRATGIP |
| | | DRFSGNGSGTDFTLTISRLEPEDFAVYYCQQYGSPPRFTFGPGTKVDIK |
| BCMA_EBB- | 499 | GAGGTGCAGTTGGTCGAAAGCGGGGGCGGGCTTGTGCAGCCTGGC |
| C1980-G4-nt | | GGATCACTGCGGCTGTCCTGCGCGGCATCAGGCTTCACGTTTTCTTC |
| ScFv domain | | CTACGCCATGTCCTGGGTGCGCCAGGCCCCTGGAAAGGGACTGGAA |
| | | TGGGTGTCCGCGATTTCGGGGTCCGGCGGGAGCACCTACTACGCCG |
| | | ATTCCGTGAAGGGCCGCTTCACTATCTCGCGGGACAACTCCAAGAAC |
| | | ACCCTCTACCTCCAAATGAATAGCCTGCGGGCCGAGGATACCGCCGT |
| | | CTACTATTGCGCTAAGGTCGTGCGCGACGGAATGGACGTGTGGGGA |
| | | CAGGGTACCACCGTGACAGTGTCCTCGGGGGGAGGCGGTAGCGGC |
| | | GGAGGAGGAAGCGGTGGTGGAGGTTCCGAGATTGTGCTGACTCAAT |
| | | CACCCGCGACCCTGAGCCTGTCCCCCGGCGAAAGGGCCACTCTGTC |
| | | CTGTCGGGCCAGCCAATCAGTCTCCTCCTCGTACCTGGCCTGGTACC |
| | | AGCAGAAGCCAGGACAGGCTCCGAGACTCCTTATCTATGGCGCATCC |
| | | TCCCGCGCCACCGGAATCCCGGATAGGTTCTCGGGAAACGGATCGG |
| | | GGACCGACTTCACTCTCACCATCTCCCGGCTGGAACCGGAGGACTTC |
| | | GCCGTGTACTACTGCCAGCAGTACGGCAGCCCGCCTAGATTCACTTT |
| | | CGGCCCCGGCACCAAAGTGGACATCAAG |
| BCMA_EBB- | 500 | EVQLVESGGGLVQPGGSLRLSCAASGFTFSSYAMSWVRQAPGKGLEW |
| C1980-G4-aa | | VSAISGSGGSTYYADSVKGRFTISRDNSKNTLYLQMNSLRAEDTAVYYC |
| VH | | AKVVRDGMDVWGQGTTVTVSS |
| BCMA_EBB- | 501 | EIVLTQSPATLSLSPGERATLSCRASQSVSSSYLAWYQQKPGQAPRLLIY |
| C1980-G4-aa | | GASSRATGIPDRFSGNGSGTDFTLTISRLEPEDFAVYYCQQYGSPPRFT |
| VL | | FGPGTKVDIK |

BCMA_EBB-C1980-D2

| | | |
|---|---|---|
| BCMA_EBB- | 502 | EVQLLESGGGLVQPGGSLRLSCAASGFTFSSYAMSWVRQAPGKGLEW |
| C1980-D2-aa | | VSAISGSGGSTYYADSVKGRFTISRDNSKNTLYLQMNSLRAEDTAVYYC |
| ScFv domain | | AKIPQTGTFDYWGQGTLVTVSSGGGGSGGGGSGGGGSEIVLTQSPGTL |
| | | SLSPGERATLSCRASQSVSSSYLAWYQQRPGQAPRLLIYGASSRATGIP |
| | | DRFSGSGSGTDFTLTISRLEPEDFAVYYCQHYGSSPSWTFGQGTRLEIK |
| BCMA_EBB- | 503 | GAAGTGCAGCTGCTGGAGTCCGGCGGTGGATTGGTGCAACCGGGG |
| C1980-D2-nt | | GGATCGCTCAGACTGTCCTGTGCGGCGTCAGGCTTCACCTTCTCGAG |
| ScFv domain | | CTACGCCATGTCATGGGTCAGACAGGCCCCTGGAAAGGGTCTGGAA |
| | | TGGGTGTCCGCCATTTCCGGGAGCGGGGGATCTACATACTACGCCG |
| | | ATAGCGTGAAGGGCCGCTTCACCATTTCCCGGGACAACTCCAAGAAC |
| | | ACTCTCTATCTGCAAATGAACTCCCTCCGCGCTGAGGACACTGCCGT |
| | | GTACTACTGCGCCAAAATCCCTCAGACCGGCACCTTCGACTACTGGG |
| | | GACAGGGGACTCTGGTCACCGTCAGCAGCGGTGGCGGAGGTTCGG |
| | | GGGGAGGAGGAAGCGGCGGCGGAGGGTCCGAGATTGTGCTGACCC |
| | | AGTCACCCGGCACTTTGTCCCTGTCGCCTGGAGAAAGGGCCACCCTT |
| | | TCCTGCCGGGCATCCCAATCCGTGTCCTCCTCGTACCTGGCCTGGTA |
| | | CCAGCAGAGGCCCGGACAGGCCCCACGGCTTCTGATCTACGGAGCA |
| | | AGCAGCCGCGCGACCGGTATCCCGGACCGGTTTTCGGGCTCGGGCT |
| | | CAGGAACTGACTTCACCCTCACCATCTCCCGCCTGGAACCCGAAGAT |
| | | TTCGCTGTGTATTACTGCCAGCACTACGGCAGCTCCCCGTCCTGGAC |
| | | GTTCGGCCAGGGAACTCGGCTGGAGATCAAG |
| BCMA_EBB- | 504 | EVQLLESGGGLVQPGGSLRLSCAASGFTFSSYAMSWVRQAPGKGLEW |
| C1980-D2-aa | | VSAISGSGGSTYYADSVKGRFTISRDNSKNTLYLQMNSLRAEDTAVYYC |
| VH | | AKIPQTGTFDYWGQGTLVTVSS |
| BCMA_EBB- | 505 | EIVLTQSPGTLSLSPGERATLSCRASQSVSSSYLAWYQQRPGQAPRLLIY |
| C1980-D2-aa | | GASSRATGIPDRFSGSGSGTDFTLTISRLEPEDFAVYYCQHYGSSPSWT |
| VL | | FGQGTRLEIK |

BCMA_EBB-C1978-A10

| | | |
|---|---|---|
| BCMA_EBB- | 506 | EVQLVETGGGLVQPGGSLRLSCAASGFTFSSYAMSWVRQAPGKGLEW |
| C1978-A10-aa | | VSAISGSGGSTYYADSVKGRFTMSRENDKNSVFLQMNSLRVEDTGVYY |
| ScFv domain | | CARANYKRELRYYYGMDVWGQGTMVTVSSGGGGSGGGGSGGGGSEI |
| | | VMTQSPGTLSLSPGESATLSCRASQRVASNYLAWYQHKPGQAPSLLISG |
| | | ASSRATGVPDRFSGSGSGTDFTLAISRLEPEDSAVYYCQHYDSSPSWTF |
| | | GQGTKVEIK |
| BCMA_EBB- | 507 | GAAGTGCAACTGGTGGAAACCGGTGGAGGACTCGTGCAGCCTGGCG |
| C1978-A10-nt | | GCAGCCTCCGGCTGAGCTGCGCCGCTTCGGGATTCACCTTTTCCTCC |
| ScFv domain | | TACGCGATGTCTTGGGTCAGACAGGCCCCCGGAAAGGGGCTGGAAT |
| | | GGGTGTCAGCCATCTCCGGCTCCGGCGGATCAACGTACTACGCCGA |
| | | CTCCGTGAAAGGCCGGTTCACCATGTCGCGCGAGAATGACAAGAACT |
| | | CCGTGTTCCTGCAAATGAACTCCCTGAGGGTGGAGGACACCGGAGT |
| | | GTACTATTGTGCGCGCGCCAACTACAAGAGAGAGCTGCGGTACTACT |
| | | ACGGAATGGACGTCTGGGGACAGGGAACTATGGTGACCGTGTCATC |
| | | CGGTGGAGGGGGAAGCGGCGGTGGAGGCAGCGGGGGCGGGGGTT |
| | | CAGAAATTGTCATGACCCAGTCCCCGGGAACTCTTTCCCTCTCCCCC |
| | | GGGGAATCCGCGACTTTGTCCTGCCGGGCCAGCCAGCGCGTGGCCT |
| | | CGAACTACCTCGCATGGTACCAGCATAAGCCAGGCCAAGCCCCTTCC |
| | | CTGCTGATTTCCGGGGCTAGCAGCCGCGCCACTGGCGTGCCGGATA |
| | | GGTTCTCGGGAAGCGGCTCGGGTACCGATTTCACCCTGGCAATCTC |
| | | GCGGCTGGAACCGGAGGATTCGGCCGTGTACTACTGCCAGCACTAT |
| | | GACTCATCCCCCTCCTGGACATTCGGACAGGGCACCAAGGTCGAGAT |
| | | CAAG |
| BCMA_EBB- | 508 | EVQLVETGGGLVQPGGSLRLSCAASGFTFSSYAMSWVRQAPGKGLEW |
| C1978-A10-aa | | VSAISGSGGSTYYADSVKGRFTMSRENDKNSVFLQMNSLRVEDTGVYY |
| VH | | CARANYKRELRYYYGMDVWGQGTMVTVSS |
| BCMA_EBB- | 509 | EIVMTQSPGTLSLSPGESATLSCRASQRVASNYLAWYQHKPGQAPSLLI |
| C1978-A10-aa | | SGASSRATGVPDRFSGSGSGTDFTLAISRLEPEDSAVYYCQHYDSSPS |
| VL | | WTFGQGTKVEIK |

BCMA_EBB-C1978-D4

| | | |
|---|---|---|
| BCMA_EBB- | 510 | EVQLLETGGGLVQPGGSLRLSCAASGFSFSSYAMSWVRQAPGKGLEW |
| C1978-D4-aa | | VSAISGSGGSTYYADSVKGRFTISRDNSKNTLYLQMNSLRAEDTAVYYC |
| ScFv domain | | AKALVGATGAFDIWGQGTLVTVSSGGGGSGGGGSGGGGSEIVLTQSPG |
| | | TLSLSPGERATLSCRASQSLSSNFLAWYQQKPGQAPGLLIYGASNWAT |
| | | GTPDRFSGSGSGTDFTLTITRLEPEDFAVYYCQYYGTSPMYTFGQGTKV |
| | | EIK |
| BCMA_EBB- | 511 | GAAGTGCAGCTGCTCGAAACCGGTGGAGGGCTGGTGCAGCCAGGG |
| C1978-D4-nt | | GGCTCCCTGAGGCTTTCATGCGCCGCTAGCGGATTCTCCTTCTCCTC |
| ScFv domain | | TTACGCCATGTCGTGGGTCCGCCAAGCCCCTGGAAAAGGCCTGGAA |
| | | TGGGTGTCCGCGATTTCCGGGAGCGGAGGTTCGACCTATTACGCCG |
| | | ACTCCGTGAAGGGCCGCTTTACCATCTCCCGGGATAACTCCAAGAAC |
| | | ACTCTGTACCTCCAAATGAACTCGCTGAGAGCCGAGGACACCGCCGT |
| | | GTATTACTGCGCGAAGGCGCTGGTCGGCGCGACTGGGGCATTCGAC |
| | | ATCTGGGGACAGGGAACTCTTGTGACCGTGTCGAGCGGAGGCGGCG |
| | | GCTCCGGCGGAGGAGGGAGCGGGGGCGGTGGTTCCGAAATCGTGT |
| | | TGACTCAGTCCCCGGGAACCCTGAGCTTGTCACCCGGGGAGCGGGC |
| | | CACTCTCTCCTGTCGCGCCTCCCAATCGCTCTCATCCAATTTCCTGGC |
| | | CTGGTACCAGCAGAAGCCCGGACAGGCCCCGGGCCTGCTCATCTAC |
| | | GGCGCTTCAAACTGGGCAACGGGAACCCCTGATCGGTTCAGCGGAA |
| | | GCGGATCGGGTACTGACTTTACCCTGACCATCACCAGACTGGAACCG |
| | | GAGGACTTCGCCGTGTACTACTGCCAGTACTACGGCACCTCCCCCAT |
| | | GTACACATTCGGACAGGGTACCAAGGTCGAGATTAAG |
| BCMA_EBB- | 512 | EVQLLETGGGLVQPGGSLRLSCAASGFSFSSYAMSWVRQAPGKGLEW |
| C1978-D4-aa | | VSAISGSGGSTYYADSVKGRFTISRDNSKNTLYLQMNSLRAEDTAVYYC |
| VH | | AKALVGATGAFDIWGQGTLVTVSS |
| BCMA_EBB- | 513 | EIVLTQSPGTLSLSPGERATLSCRASQSLSSNFLAWYQQKPGQAPGLLIY |
| C1978-D4-aa | | GASNWATGTPDRFSGSGSGTDFTLTITRLEPEDFAVYYCQYYGTSPMYT |
| VL | | FGQGTKVEIK |

BCMA_EBB-C1980-A2

| | | |
|---|---|---|
| BCMA_EBB- | 514 | EVQLLESGGGLVQPGGSLRLSCAASGFTFSSYAMSWVRQAPGKGLEW |
| C1980-A2-aa | | VSAISGSGGSTYYADSVKGRFTISRDNSKNTLYLQMNSLRAEDTAVYYC |
| ScFv domain | | VLWFGEGFDPWGQGTLVTVSSGGGGSGGGGSGGGGSDIVLTQSPLSL |
| | | PVTPGEPASISCRSSQSLLHSNGYNYLDWYLQKPGQSPQLLIYLGSNRA |
| | | SGVPDRFSGSGSGTDFTLKISRVEAEDVGVYYCMQALQTPLTFGGGTKV |
| | | DIK |
| BCMA_EBB- | 515 | GAAGTGCAGCTGCTTGAGAGCGGTGGAGGTCTGGTGCAGCCCGGG |
| C1980-A2-nt | | GGATCACTGCGCCTGTCCTGTGCCGCGTCCGGTTTCACTTTCTCCTC |
| ScFv domain | | GTACGCCATGTCGTGGGTCAGACAGGCACCGGGAAAGGGACTGGAA |
| | | TGGGTGTCAGCCATTTCGGGTTCGGGGGGCAGCACCTACTACGCTG |
| | | ACTCCGTGAAGGGCCGGTTCACCATTTCCCGCGACAACTCCAAGAAC |
| | | ACCTTGTACCTCCAAATGAACTCCCTGCGGGCCGAAGATACCGCCGT |
| | | GTATTACTGCGTGCTGTGGTTCGGAGAGGGATTCGACCCGTGGGGA |
| | | CAAGGAACACTCGTGACTGTGTCATCCGGCGGAGGCGGCAGCGGTG |
| | | GCGGCGGTTCCGGCGGCGGCGGATCTGACATCGTGTTGACCCAGTC |
| | | CCCTCTGAGCCTGCCGGTCACTCCTGGCGAACCAGCCAGCATCTCCT |
| | | GCCGGTCGAGCCAGTCCCTCCTGCACTCCAATGGGTACAACTACCTC |
| | | GATTGGTATCTGCAAAAGCCGGGCCAGAGCCCCCAGCTGCTGATCTA |
| | | CCTTGGGTCAAACCGCGCTTCCGGGGTGCCTGATAGATTCTCCGGGT |
| | | CCGGGAGCGGAACCGACTTTACCCTGAAAATCTCGAGGGTGGAGGC |
| | | CGAGGACGTCGGAGTGTACTACTGCATGCAGGCGCTCCAGACTCCC |
| | | CTGACCTTCGGAGGAGGAACGAAGGTCGACATCAAGA |
| BCMA_EBB- | 516 | EVQLLESGGGLVQPGGSLRLSCAASGFTFSSYAMSWVRQAPGKGLEW |
| C1980-A2-aa | | VSAISGSGGSTYYADSVKGRFTISRDNSKNTLYLQMNSLRAEDTAVYYC |
| VH | | VLWFGEGFDPWGQGTLVTVSS |
| BCMA_EBB- | 517 | DIVLTQSPLSLPVTPGEPASISCRSSQSLLHSNGYNYLDWYLQKPGQSP |
| C1980-A2-aa | | QLLIYLGSNRASGVPDRFSGSGSGTDFTLKISRVEAEDVGVYYCMQALQ |
| VL | | TPLTFGGGTKVDIK |

BCMA_EBB-C1981-C3

| | | |
|---|---|---|
| BCMA_EBB- | 518 | QVQLVESGGGLVQPGGSLRLSCAASGFTFSSYAMSWVRQAPGKGLEW |
| C1981-C3-aa | | VSAISGSGGSTYYADSVKGRFTISRDNSKNTLYLQMNSLRAEDTAVYYC |
| ScFv domain | | AKVGYDSSGYYRDYYGMDVWGQGTTVTVSSGGGGSGGGGSGGGGS |
| | | EIVLTQSPGTLSLSPGERATLSCRASQSVSSSYLAWYQQKPGQAPRLLIY |
| | | GTSSRATGISDRFSGSGSGTDFTLTISRLEPEDFAVYYCQHYGNSPPKFT |
| | | FGPGTKLEIK |
| BCMA_EBB- | 519 | CAAGTGCAGCTCGTGGAGTCAGGCGGAGGACTGGTGCAGCCCGGG |
| C1981-C3-nt | | GGCTCCCTGAGACTTTCCTGCGCGGCATCGGGTTTTACCTTCTCCTC |
| ScFv domain | | CTATGCTATGTCCTGGGTGCGCCAGGCCCCGGGAAAGGGACTGGAA |
| | | TGGGTGTCCGCAATCAGCGGTAGCGGGGGCTCAACATACTACGCCG |
| | | ACTCCGTCAAGGGTCGCTTCACTATTTCCCGGGACAACTCCAAGAAT |
| | | ACCCTGTACCTCCAAATGAACAGCCTCAGGGCCGAGGATACTGCCGT |
| | | GTACTACTGCGCCAAAGTCGGATACGATAGCTCCGGTTACTACCGGG |
| | | ACTACTACGGAATGGACGTGTGGGGACAGGGCACCACCGTGACCGT |
| | | GTCAAGCGGCGGAGGCGGTTCAGGAGGGGGAGGCTCCGGCGGTGG |
| | | AGGGTCCGAAATCGTCCTGACTCAGTCGCCTGGCACTCTGTCGTTGT |
| | | CCCCGGGGGAGCGCGCTACCCTGTCGTGTCGGGCGTCGCAGTCCG |
| | | TGTCGAGCTCCTACCTCGCGTGGTACCAGCAGAAGCCCGGACAGGC |
| | | CCCTAGACTTCTGATCTACGGCACTTCTTCACGCGCCACCGGGATCA |
| | | GCGACAGGTTCAGCGGCTCCGGCTCCGGGACCGACTTCACCCTGAC |
| | | CATTAGCCGGCTGGAGCCTGAAGATTTCGCCGTGTATTACTGCCAAC |
| | | ACTACGGAAACTCGCCGCCAAAGTTCACGTTCGGACCCGGAACCAAG |
| | | CTGGAAATCAAG |
| BCMA_EBB- | 520 | QVQLVESGGGLVQPGGSLRLSCAASGFTFSSYAMSWVRQAPGKGLEW |
| C1981-C3-aa | | VSAISGSGGSTYYADSVKGRFTISRDNSKNTLYLQMNSLRAEDTAVYYC |
| VH | | AKVGYDSSGYYRDYYGMDVWGQGTTVTVSS |
| BCMA_EBB- | 521 | EIVLTQSPGTLSLSPGERATLSCRASQSVSSSYLAWYQQKPGQAPRLLIY |
| C1981-C3-aa | | GTSSRATGISDRFSGSGSGTDFTLTISRLEPEDFAVYYCQHYGNSPPKFT |
| VL | | FGPGTKLEIK |

BCMA_EBB-C1978-G4

| | | |
|---|---|---|
| BCMA_EBB- | 522 | EVQLVESGGGLVQPGGSLRLSCAASGFTFSSYAMSWVRQAPGKGLEW |
| C1978-G4-aa | | VSAISGSGGSTYYADSVKGRFTISRDNSKNTLYLQMNSLRAEDTAVYYC |
| ScFv domain | | AKMGWSSGYLGAFDIWGQGTTVTVSSGGGGSGGGGSGGGGSEIVLTQ |
| | | SPGTLSLSPGERATLSCRASQSVASSFLAWYQQKPGQAPRLLIYGASGR |
| | | ATGIPDRFSGSGSGTDFTLTISRLEPEDFAVYYCQHYGGSPRLTFGGGT |
| | | KVDIK |
| BCMA_EBB- | 523 | GAAGTCCAACTGGTGGAGTCCGGGGGAGGGCTCGTGCAGCCCGGA |
| C1978-G4-nt | | GGCAGCCTTCGGCTGTCGTGCGCCGCCTCCGGGTTCACGTTCTCAT |
| ScFv domain | | CCTACGCGATGTCGTGGGTCAGACAGGCACCAGGAAAGGGACTGGA |
| | | ATGGGTGTCCGCCATTAGCGGCTCCGGCGGTAGCACCTACTATGCC |
| | | GACTCAGTGAAGGGAAGGTTCACTATCTCCCGCGACAACAGCAAGAA |
| | | CACCCTGTACCTCCAAATGAACTCTCTGCGGGCCGAGGATACCGCG |
| | | GTGTACTATTGCGCCAAGATGGGTTGGTCCAGCGGATACTTGGGAGC |
| | | CTTCGACATTTGGGGACAGGGCACTACTGTGACCGTGTCCTCCGGG |
| | | GGTGGCGGATCGGGAGGCGGCGGCTCGGGTGGAGGGGGTTCCGAA |
| | | ATCGTGTTGACCCAGTCACCGGGAACCCTCTCGCTGTCCCCGGGAG |
| | | AACGGGCTACACTGTCATGTAGAGCGTCCCAGTCCGTGGCTTCCTCG |
| | | TTCCTGGCCTGGTACCAGCAGAAGCCGGGACAGGCACCCCGCCTGC |
| | | TCATCTACGGAGCCAGCGGCCGGGCGACCGGCATCCCTGACCGCTT |
| | | CTCCGGTTCCGGCTCGGGCACCGACTTTACTCTGACCATTAGCAGGC |
| | | TTGAGCCCGAGGATTTTGCCGTGTACTACTGCCAACACTACGGGGGG |
| | | AGCCCTCGCCTGACCTTCGGAGGCGGAACTAAGGTCGATATCAAAA |
| BCMA_EBB- | 524 | EVQLVESGGGLVQPGGSLRLSCAASGFTFSSYAMSWVRQAPGKGLEW |
| C1978-G4-aa | | VSAISGSGGSTYYADSVKGRFTISRDNSKNTLYLQMNSLRAEDTAVYYC |
| VH | | AKMGWSSGYLGAFDIWGQGTTVTVSS |
| BCMA_EBB- | 525 | EIVLTQSPGTLSLSPGERATLSCRASQSVASSFLAWYQQKPGQAPRLLIY |
| C1978-G4-aa | | GASGRATGIPDRFSGSGSGTDFTLTISRLEPEDFAVYYCQHYGGSPRLT |
| VL | | FGGGTKVDIK |

[0432] In some embodiments, additional exemplary CAR constructs are generated using the VH and VL sequences from PCT Publication WO2012/0163805 (the contents of which are hereby incorporated by reference in its entirety). In some embodiments, additional exemplary CAR constructs are generated using the VH and VL sequences from PCT Publication WO2016/014565 (the contents of which are hereby incorporated by reference in its entirety). In some embodiments, additional exemplary CAR constructs are generated using the VH and VL sequences from PCT Publication WO2014/122144 (the contents of which are hereby incorporated by reference in its entirety). In some embodiments, additional exemplary CAR constructs are generated using the CAR molecules, and/or the VH and VL sequences from PCT Publication WO2016/014789 (the contents of which are hereby incorporated by reference in its entirety). In some embodiments, additional exemplary CAR constructs are generated using the CAR molecules, and/or the VH and VL sequences from PCT Publication WO2014/089335 (the contents of which are hereby incorporated by reference in its entirety). In some embodiments, additional exemplary CAR constructs are generated using the CAR molecules, and/or the VH and VL sequences from PCT Publication WO2014/140248 (the contents of which are hereby incorporated by reference in its entirety).

[0433] In some embodiments, additional exemplary CAR constructs can also be generated using the VH and VL sequences found in Table 12. The amino acid sequences of exemplary scFv domains comprising the VH and VL domains and a linker sequence, and full-length CARs are also found in Table 12.

TABLE 12
Additional exemplary BCMA binding domain sequences

| | | SEQ |
|---|---|---|
| | | ID |
| Name | Sequence | NO: |
| A7D12.2 | QIQLVQSGPDLKKPGETVKLSCKASGYTFTNFGMNWVKQAPGKGFKWMAWIN | 526 |
| VH | TYTGESYFADDFKGRFAFSVETSATTAYLQINNLKTEDTATYFCARGEIYYGYDG | |
| | GFAYWGQGTLVTVSA | |
| A7D12.2 | DVVMTQSHRFMSTSVGDRVSITCRASQDVNTAVSWYQQKPGQSPKLLIFSASY | 527 |
| VL | RYTGVPDRFTGSGSGADFTLTISSVQAEDLAVYYCQQHYSTPWTFGGGTKLDIK | |
| A7D12.2 | QIQLVQSGPDLKKPGETVKLSCKASGYTFTNFGMNWVKQAPGKGFKWMAWIN | 528 |
| scFv | TYTGESYFADDFKGRFAFSVETSATTAYLQINNLKTEDTATYFCARGEIYYGYDG | |
| domain | GFAYWGQGTLVTVSAGGGGSGGGGSGGGGSDVVMTQSHRFMSTSVGDRVSI | |
| | TCRASQDVNTAVSWYQQKPGQSPKLLIFSASYRYTGVPDRFTGSGSGADFTLTI | |
| | SSVQAEDLAVYYCQQHYSTPWTFGGGTKLDIK | |
| C11D5.3 | QIQLVQSGPELKKPGETVKISCKASGYTFTDYSINWVKRAPGKGLKWMGWINTE | 529 |
| VH | TREPAYAYDFRGRFAFSLETSASTAYLQINNLKYEDTATYFCALDYSYAMDYWG | |
| | QGTSVTVSS | |
| C11D5.3 | DIVLTQSPASLAMSLGKRATISCRASESVSVIGAHLIHWYQQKPGQPPKLLIYLAS | 530 |
| VL | NLETGVPARFSGSGSGTDFTLTIDPVEEDDVAIYSCLQSRIFPRTFGGGTKLEIK | |
| C11D5.3 | QIQLVQSGPELKKPGETVKISCKASGYTFTDYSINWVKRAPGKGLKWMGWINTE | 531 |
| scFv | TREPAYAYDFRGRFAFSLETSASTAYLQINNLKYEDTATYFCALDYSYAMDYWG | |
| domain | QGTSVTVSSGGGGSGGGGSGGGGSQIQLVQSGPELKKPGETVKISCKASGYT | |
| | FTDYSINWVKRAPGKGLKWMGWINTETREPAYAYDFRGRFAFSLETSASTAYL | |
| | QINNLKYEDTATYFCALDYSYAMDYWGQGTSVTVSS | |
| C12A3.2 | QIQLVQSGPELKKPGETVKISCKASGYTFRHYSMNWVKQAPGKGLKWMGRINT | 532 |
| VH | ESGVPIYADDFKGRFAFSVETSASTAYLVINNLKDEDTASYFCSNDYLYSLDFWG | |
| | QGTALTVSS | |
| C12A3.2 | DIVLTQSPPSLAMSLGKRATISCRASESVTILGSHLIYWYQQKPGQPPTLLIQLAS | 533 |
| VL | NVQTGVPARFSGSGSRTDFTLTIDPVEEDDVAVYYCLQSRTIPRTFGGGTKLEIK | |
| C12A3.2 | QIQLVQSGPELKKPGETVKISCKASGYTFRHYSMNWVKQAPGKGLKWMGRINT | 534 |
| scFv | ESGVPIYADDFKGRFAFSVETSASTAYLVINNLKDEDTASYFCSNDYLYSLDFWG | |
| domain | QGTALTVSSGGGGSGGGGSGGGGSDIVLTQSPPSLAMSLGKRATISCRASESV | |
| | TILGSHLIYWYQQKPGQPPTLLIQLASNVQTGVPARFSGSGSRTDFTLTIDPVEE | |
| | DDVAVYYCLQSRTIPRTFGGGTKLEIK | |
| C13F12.1 | QIQLVQSGPELKKPGETVKISCKASGYTFTHYSMNWVKQAPGKGLKWMGRINT | 535 |
| VH | ETGEPLYADDFKGRFAFSLETSASTAYLVINNLKNEDTATFFCSNDYLYSCDYW | |
| | GQGTTLTVSS | |
| C13F12.1 | DIVLTQSPPSLAMSLGKRATISCRASESVTILGSHLIYWYQQKPGQPPTLLIQLAS | 536 |
| VL | NVQTGVPARFSGSGSRTDFTLTIDPVEEDDVAVYYCLQSRTIPRTFGGGTKLEIK | |
| C13F12.1 | QIQLVQSGPELKKPGETVKISCKASGYTFTHYSMNWVKQAPGKGLKWMGRINT | 537 |
| scFv | ETGEPLYADDFKGRFAFSLETSASTAYLVINNLKNEDTATFFCSNDYLYSCDYW | |
| domain | GQGTTLTVSSGGGGSGGGGSGGGGSDIVLTQSPPSLAMSLGKRATISCRASES | |
| | VTILGSHLIYWYQQKPGQPPTLLIQLASNVQTGVPARFSGSGSRTDFTLTIDPVE | |
| | EDDVAVYYCLQSRTIPRTFGGGTKLEIK | |

[0434] The human CDR sequences of the scFv domains are shown in Table 13 for the heavy chain variable domains and in Table 14 for the light chain variable domains. “ID” stands for the respective SEQ ID NO for each CDR. The CDRs are shown according to the Kabat definition, however, the CDRs under other convention, for example, Chothia or the combined Kabat/Chothia definitions may be readily deduced based on the VH and VL sequences above.

```
TABLE 13
Heavy Chain Variable Domain CDRs according to the
Kabat numbering scheme (Kabat et al. (1991),
  “Sequences of Proteins of Immunological Interest,” 5th Ed.
  Public Health Service, National Institutes of Health, Bethesda, MD)
```

| Candidate | HCDR1 | ID | HCDR2 | ID | HCDR3 | ID |
|---|---|---|---|---|---|---|
| 139109 | NHGMS | 538 | GIVYSGSTYYAASV | 539 | HGGESDV | 540 |
| | | | KG | | | |
| 139103 | NYAMS | 541 | GISRSGENTYYADS | 542 | SPAHYYGGMDV | 543 |
| | | | VKG | | | |
| 139105 | DYAMH | 544 | GISWNSGSIGYADS | 545 | HSFLAY | 546 |
| | | | VKG | | | |
| 139111 | NHGMS | 538 | GIVYSGSTYYAASV | 539 | HGGESDV | 540 |
| | | | KG | | | |
| 139100 | NFGIN | 547 | WINPKNNNTNYAQK | 548 | GPYYYQSYMDV | 549 |
| | | | FQG | | | |
| 139101 | SDAMT | 550 | VISGSGGTTYYADS | 551 | LDSSGYYYARGPRY | 552 |
| | | | VKG | | | |
| 139102 | NYGIT | 553 | WISAYNGNTNYAQK | 554 | GPYYYYMDV | 555 |
| | | | FQG | | | |
| 139104 | NHGMS | 538 | GIVYSGSTYYAASV | 539 | HGGESDV | 540 |
| | | | KG | | | |
| 139106 | NHGMS | 538 | GIVYSGSTYYAASV | 539 | HGGESDV | 540 |
| | | | KG | | | |
| 139107 | NHGMS | 538 | GIVYSGSTYYAASV | 539 | HGGESDV | 540 |
| | | | KG | | | |
| 139108 | DYYMS | 556 | YISSSGSTIYYADSV | 557 | ESGDGMDV | 558 |
| | | | KG | | | |
| 139110 | DYYMS | 556 | YISSSGNTIYYADSV | 559 | STMVREDY | 560 |
| | | | KG | | | |
| 139112 | NHGMS | 538 | GIVYSGSTYYAASV | 539 | HGGESDV | 540 |
| | | | KG | | | |
| 139113 | NHGMS | 538 | GIVYSGSTYYAASV | 539 | HGGESDV | 540 |
| | | | KG | | | |
| 139114 | NHGMS | 538 | GIVYSGSTYYAASV | 539 | HGGESDV | 540 |
| | | | KG | | | |
| 149362 | SSYYYWG | 561 | SIYYSGSAYYNPSL | 562 | HWQEWPDAFDI | 563 |
| | | | KS | | | |
| 149363 | TSGMCVS | 564 | RIDWDEDKFYSTSL | 565 | SGAGGTSATAFDI | 566 |
| | | | KT | | | |
| 149364 | SYSMN | 567 | SISSSSSYIYYADSV | 568 | TIAAVYAFDI | 569 |
| | | | KG | | | |
| 149365 | DYYMS | 556 | YISSSGSTIYYADSV | 557 | DLRGAFDI | 570 |
| | | | KG | | | |
| 149366 | SHYIH | 571 | MINPSGGVTAYSQT | 572 | EGSGSGWYFDF | 573 |
| | | | LQG | | | |
| 149367 | SGGYYWS | 574 | YIYYSGSTYYNPSLK | 575 | AGIAARLRGAFDI | 576 |
| | | | S | | | |
| 149368 | SYAIS | 577 | GIIPIFGTANYAQKF | 578 | RGGYQLLRWDVGLL | 579 |
| | | | QG | | RSAFDI | |
| 149369 | SNSAAWN | 580 | RTYYRSKWYSFYAI | 581 | SSPEGLFLYWFDP | 582 |
| | | | SLKS | | | |
| BCMA_EBB- | SYAMS | 583 | AISGSGGSTYYADS | 584 | VEGSGSLDY | 585 |
| C1978-A4 | | | VKG | | | |
| BCMA_EBB- | RYPMS | 586 | GISDSGVSTYYADS | 587 | RAGSEASDI | 588 |
| C1978-G1 | | | AKG | | | |
| BCMA_EBB- | SYAMS | 583 | AISGSGGSTYYADS | 584 | ATYKRELRYYYGMD | 589 |
| C1979-C1 | | | VKG | | V | |
| BCMA_EBB- | SYAMS | 583 | AISGSGGSTYYADS | 584 | ATYKRELRYYYGMD | 589 |
| C1978-C7 | | | VKG | | V | |
| BCMA_EBB- | DYAMH | 544 | GISWNSGSIGYADS | 545 | VGKAVPDV | 590 |
| C1978-D10 | | | VKG | | | |
| BCMA_EBB- | DYAMH | 544 | SINWKGNSLAYGDS | 591 | HQGVAYYNYAMDV | 592 |
| C1979-C12 | | | VKG | | | |
| BCMA_EBB- | SYAMS | 583 | AISGSGGSTYYADS | 584 | VVRDGMDV | 593 |
| C1980-G4 | | | VKG | | | |
| BCMA_EBB- | SYAMS | 583 | AISGSGGSTYYADS | 584 | IPQTGTFDY | 594 |
| C1980-D2 | | | VKG | | | |
| BCMA_EBB- | SYAMS | 583 | AISGSGGSTYYADS | 584 | ANYKRELRYYYGMD | 595 |
| C1978-A10 | | | VKG | | V | |
| BCMA_EBB- | SYAMS | 583 | AISGSGGSTYYADS | 584 | ALVGATGAFDI | 596 |
| C1978-D4 | | | VKG | | | |
| BCMA_EBB- | SYAMS | 583 | AISGSGGSTYYADS | 584 | WFGEGFDP | 597 |
| C1980-A2 | | | VKG | | | |
| BCMA_EBB- | SYAMS | 583 | AISGSGGSTYYADS | 584 | VGYDSSGYYRDYY | 598 |
| C1981-C3 | | | VKG | | GMDV | |
| BCMA_EBB- | SYAMS | 583 | AISGSGGSTYYADS | 584 | MGWSSGYLGAFDI | 599 |
| C1978-G4 | | | VKG | | | |
| A7D12.2 | NFGMN | 600 | WINTYTGESYFADD | 601 | GEIYYGYDGGFAY | 602 |
| | | | FKG | | | |
| C11D5.3 | DYSIN | 603 | WINTETREPAYAYD | 604 | DYSYAMDY | 605 |
| | | | FRG | | | |
| C12A3.2 | HYSMN | 606 | RINTESGVPIYADDF | 607 | DYLYSLDF | 608 |
| | | | KG | | | |
| C13F12.1 | HYSMN | 606 | RINTETGEPLYADD | 609 | DYLYSCDY | 610 |
| | | | FKG | | | |

TABLE 14
Light Chain Variable Domain CDRs according to the Kabat numbering scheme
(Kabat et al. (1991), “Sequences of Proteins of Immunological Interest,”
5th Ed. Public Health Service,
National Institutes of Health, Bethesda, MD)

| Candidate | LCDR1 | ID | LCDR2 | ID | LCDR3 | ID |
|---|---|---|---|---|---|---|
| 139109 | RASQSISSYLN | 611 | AASSLQS | 612 | QQSYSTPYT | 613 |
| 139103 | RASQSISSSFLA | 614 | GASRRAT | 815 | QQYHSSPSWT | 616 |
| 139105 | RSSQSLLHSNGYNYL | 617 | LGSNRAS | 618 | MQALQTPYT | 619 |
| | D | | | | | |
| 139111 | KSSQSLLRNDGKTPL | 620 | EVSNRFS | 621 | MQNIQFPS | 622 |
| | Y | | | | | |
| 139100 | RSSQSLLHSNGYNYL | 623 | LGSKRAS | 624 | MQALQTPYT | 619 |
| | N | | | | | |
| 139101 | RASQSISSYLN | 611 | GASTLAS | 625 | QQSYKRAS | 626 |
| 139102 | RSSQSLLYSNGYNYV | 627 | LGSNRAS | 618 | MQGRQFPYS | 628 |
| | D | | | | | |
| 139104 | RASQSVSSNLA | 629 | GASTRAS | 830 | QQYGSSLT | 631 |
| 139106 | RASQSVSSKLA | 632 | GASIRAT | 838 | QQYGSSSWT | 637 |
| 139107 | RASQSVGSTNLA | 638 | DASNRAT | 839 | QQYGSSPPWT | 640 |
| 139108 | RASQSISSYLN | 611 | AASSLQS | 812 | QQSYTLA | 641 |
| 139110 | KSSESLVHNSGKTYL | 642 | EVSNRDS | 643 | MQGTHWPGT | 644 |
| | N | | | | | |
| 139112 | QASEDINKFLN | 645 | DASTLQT | 848 | QQYESLPLT | 647 |
| 139113 | RASQSVGSNLA | 648 | GASTRAT | 849 | QQYNDWLPVT | 650 |
| 139114 | RASQSIGSSSLA | 651 | GASSRAS | 652 | QQYAGSPPFT | 653 |
| 149362 | KASQDIDDAMN | 654 | SATSPVP | 655 | LQHDNFPLT | 656 |
| 149363 | RASQDIYNNLA | 657 | AANKSQS | 858 | QHYYRFPYS | 659 |
| 149364 | RSSQSLLHSNGYNYL | 617 | LGSNRAS | 618 | MQALQTPYT | 619 |
| | D | | | | | |
| 149365 | GGNNIGTKSVH | 660 | DDSVRPS | 661 | QVWDSDSEHV | 662 |
| | | | | | V | |
| 149366 | SGDGLSKKYVS | 663 | RDKERPS | 864 | QAWDDTTVV | 665 |
| 149367 | RASQGIRNWLA | 666 | AASNLQS | 667 | QKYNSAPFT | 668 |
| 149368 | GGNNIGSKSVH | 669 | GKNNRPS | 670 | SSRDSSGDHL | 671 |
| | | | | | RV | |
| 149369 | QGDSLGNYYAT | 672 | GTNNRPS | 673 | NSRDSSGHHL | 674 |
| | | | | | L | |
| BCMA_EBB- | RASQSVSSAYLA | 675 | GASTRAT | 649 | QHYGSSFNGS | 676 |
| C1978-A4 | | | | | SLFT | |
| BCMA_EBB- | RASQSVSNSLA | 677 | DASSRAT | 678 | QQFGTSSGLT | 679 |
| C1978-G1 | | | | | | |
| BCMA_EBB- | RASQSVSSSFLA | 680 | GASSRAT | 681 | QQYHSSPSWT | 616 |
| C1979-C1 | | | | | | |
| BCMA_EBB- | RASQSVSTTFLA | 682 | GSSNRAT | 683 | QQYHSSPSWT | 616 |
| C1978-C7 | | | | | | |
| BCMA_EBB- | RASQSISSYLN | 611 | AASSLQS | 612 | QQSYSTPYS | 684 |
| C1978-D10 | | | | | | |
| BCMA_EBB- | RATQSIGSSFLA | 685 | GASQRAT | 686 | QHYESSPSWT | 687 |
| C1979-C12 | | | | | | |
| BCMA_EBB- | RASQSVSSSYLA | 688 | GASSRAT | 681 | QQYGSPPRFT | 689 |
| C1980-G4 | | | | | | |
| BCMA_EBB- | RASQSVSSSYLA | 688 | GASSRAT | 681 | QHYGSSPSWT | 690 |
| C1980-D2 | | | | | | |
| BCMA_EBB- | RASQRVASNYLA | 691 | GASSRAT | 681 | QHYDSSPSWT | 692 |
| 01978-A10 | | | | | | |
| BCMA_EBB- | RASQSLSSNFLA | 693 | GASNWAT | 694 | QYYGTSPMYT | 695 |
| C1978-D4 | | | | | | |
| BCMA_EBB- | RSSQSLLHSNGYNYL | 617 | LGSNRAS | 618 | MQALQTPLT | 696 |
| C1980-A2 | D | | | | | |
| BCMA_EBB- | RASQSVSSSYLA | 688 | GTSSRAT | 697 | QHYGNSPPKF | 698 |
| C1981-C3 | | | | | T | |
| BCMA_EBB- | RASQSVASSFLA | 699 | GASGRAT | 700 | QHYGGSPRLT | 701 |
| C1978-G4 | | | | | | |
| A7D12.2 | RASQDVNTAVS | 702 | SASYRYT | 703 | QQHYSTPWT | 704 |
| C11D5.3 | RASESVSVIGAHLIH | 705 | LASNLET | 706 | LQSRIFPRT | 707 |
| C12A3.2 | RASESVTILGSHLIY | 708 | LASNVQT | 709 | LQSRTIPRT | 710 |
| C13F12.1 | RASESVTILGSHLIY | 708 | LASNVQT | 709 | LQSRTIPRT | 710 |

[0435] In one embodiment, the BCMA binding domain comprises one or more (e.g., all three) light chain complementary determining region 1 (LC CDR1), light chain complementary determining region 2 (LC CDR2), and light chain complementary determining region 3 (LC CDR3) of a BCMA binding domain described herein, e.g., provided in Table 11, 12 or 14, and/or one or more (e.g., all three) heavy chain complementary determining region 1 (HC CDR1), heavy chain complementary determining region 2 (HC CDR2), and heavy chain complementary determining region 3 (HC CDR3) of a BCMA binding domain described herein, e.g., provided in Table 11, 12 or 13. In one embodiment, the BCMA binding domain comprises one, two, or all of LC CDR1, LC CDR2, and LC CDR3 of any amino acid sequences as provided in Table 11, incorporated herein by reference; and one, two or all of HC CDR1, HC CDR2, and HC CDR3 of any amino acid sequences as provided in Table 11.

[0436] In one embodiment, the BCMA binding domain comprises a light chain variable region described herein (e.g., in Table 11 or 12) and/or a heavy chain variable region described herein (e.g., in Table 11 or 12). In one embodiment, the BCMA binding domain is a scFv comprising a light chain and a heavy chain of an amino acid sequence listed in Table 11 or 12. In an embodiment, the BCMA binding domain (e.g., an scFv) comprises: a light chain variable region comprising an amino acid sequence having at least one, two or three modifications (e.g., substitutions, e.g., conservative substitutions) but not more than 30, 20 or 10 modifications (e.g., substitutions, e.g., conservative substitutions) of an amino acid sequence of a light chain variable region provided in Table 11 or 12, or a sequence with 95-99% identity with an amino acid sequence provided in Table 11 or 12; and/or a heavy chain variable region comprising an amino acid sequence having at least one, two or three modifications (e.g., substitutions, e.g., conservative substitutions) but not more than 30, 20 or 10 modifications (e.g., substitutions, e.g., conservative substitutions) of an amino acid sequence of a heavy chain variable region provided in Table 11 or 12, or a sequence with 95-99% identity to an amino acid sequence provided in Table 11 or 12.

[0437] In one embodiment, the BCMA binding domain comprises an amino acid sequence selected from any one of SEQ ID NOs: 382, 386, 390, 394, 398, 402, 406, 410, 414, 418, 422, 426, 430, 434, 438, 442, 446, 450, 454, 458, 462, 466, 470, 474, 478, 482, 486, 490, 494, 498, 502, 506, 510, 514, 518, 522, 528, 531, 534, or 537; or an amino acid sequence having at least one, two or three modifications (e.g., substitutions, e.g., conservative substitutions) but not more than 30, 20 or 10 modifications (e.g., substitutions, e.g., conservative substitutions) to any of the aforesaid sequences; or a sequence with 95-99% identity to any of the aforesaid sequences. In one embodiment, the BCMA binding domain is a scFv, and a light chain variable region comprising an amino acid sequence described herein, e.g., in Table 11 or 12, is attached to a heavy chain variable region comprising an amino acid sequence described herein, e.g., in Table 11 or 12, via a linker, e.g., a linker described herein. In one embodiment, the BCMA binding domain includes a (Gly4-Ser)n linker, wherein n is 1, 2, 3, 4, 5, or 6, preferably 4 (SEQ ID NO: 967). The light chain variable region and heavy chain variable region of a scFv can be, e.g., in any of the following orientations: light chain variable region-linker-heavy chain variable region or heavy chain variable region-linker-light chain variable region.

[0438] Any known CAR, e.g., the BCMA antigen binding domain of any known CAR, in the art can be used in accordance with the instant invention to construct a CAR. For example, those described herein.

[0439] In one embodiment, an antigen binding domain against ROR1 is an antigen binding portion, e.g., CDRs, of an antibody described in, e.g., Hudecek et al., Clin Cancer Res 19(12):3153-3164 (2013); WO 2011159847; and US20130101607.

[0440] In one embodiment, an antigen binding domain against CD22 is an antigen binding portion, e.g., CDRs, of an antibody described in, e.g., Haso et al., Blood, 121(7): 1165-1174 (2013); Wayne et al., Clin Cancer Res 16(6): 1894-1903 (2010); Kato et al., Leuk Res 37(1):83-88 (2013); Creative BioMart (creativebiomart.net): MOM-18047-S(P).

[0441] In one embodiment, an antigen binding domain against CD20 is an antigen binding portion, e.g., CDRs, of the antibody Rituximab, Ofatumumab, Ocrelizumab, Veltuzumab, or GA101, or derivatives thereof. In one embodiment, an antigen binding domain against CD20 is an antigen binding portion as described in WO2016/164731, hereby incorporated by reference in its entirety.

[0442] In one embodiment, the antigen binding domain comprises one, two three (e.g., all three) heavy chain CDRs, HC CDR1, HC CDR2 and HC CDR3, from an antibody listed above, and/or one, two, three (e.g., all three) light chain CDRs, LC CDR1, LC CDR2 and LC CDR3, from an antibody that binds a tumor antigen listed above. In one embodiment, the antigen binding domain comprises a heavy chain variable region and/or a variable light chain region of an antibody that binds a tumor antigen listed above.

[0443] In one embodiment, the antigen binding domain of a CAR described herein is a scFv antibody fragment. In one aspect, such antibody fragments are functional in that they retain the equivalent binding affinity, e.g., they bind the same antigen with comparable efficacy, as the IgG antibody from which it is derived. In other embodiments, the antibody fragment has a lower binding affinity, e.g., it binds the same antigen with a lower binding affinity than the antibody from which it is derived, but is functional in that it provides a biological response described herein. In one embodiment, the CAR molecule comprises an antibody fragment that has a binding affinity K_{D} of 10⁻⁴ M to 10⁻⁸ M, e.g., 10⁻⁵ M to 10⁻⁷ M, e.g., 10⁻⁶ M or 10⁻⁷ M, for the target antigen. In one embodiment, the antibody fragment has a binding affinity that is at least five-fold, 10-fold, 20-fold, 30-fold, 50-fold, 100-fold or 1,000-fold less than a reference antibody, e.g., an antibody described herein.

[0444] In one embodiment, the antigen binding domain comprises a non-human antibody or antibody fragment, e.g., a mouse antibody or antibody fragment.

[0445] In another embodiment, the antigen binding domain comprises a humanized antibody or an antibody fragment. In some aspects, a non-human antibody is humanized, where specific sequences or regions of the antibody are modified to increase similarity to an antibody naturally produced in a human or fragment thereof. In one aspect, the antigen binding domain is humanized compared to the murine sequence of the antibody or antibody fragment, e.g., scFv, from which it is derived.

[0446] A humanized antibody can be produced using a variety of techniques known in the art, including but not limited to, CDR-grafting (see, e.g., European Patent No. EP 239,400; International Publication No. WO 91/09967; and U.S. Pat. Nos. 5,225,539, 5,530,101, and 5,585,089, each of which is incorporated herein in its entirety by reference), veneering or resurfacing (see, e.g., European Patent Nos. EP 592,106 and EP 519,596; Padlan, 1991, Molecular Immunology, 28(4/5):489-498; Studnicka et al., 1994, Protein Engineering, 7(6):805-814; and Roguska et al., 1994, PNAS, 91:969-973, each of which is incorporated herein by its entirety by reference), chain shuffling (see, e.g., U.S. Pat. No. 5,565,332, which is incorporated herein in its entirety by reference), and techniques disclosed in, e.g., U.S. Patent Application Publication No. US2005/0042664, U.S. Patent Application Publication No. US2005/0048617, U.S. Pat. Nos. 6,407,213, 5,766,886, International Publication No. WO 9317105, Tan et al., J. Immunol., 169:1119-25 (2002), Caldas et al., Protein Eng., 13(5):353-60 (2000), Morea et al., Methods, 20(3):267-79 (2000), Baca et al., J. Biol. Chem., 272(16):10678-84 (1997), Roguska et al., Protein Eng., 9(10):895-904 (1996), Couto et al., Cancer Res., 55 (23 Supp):5973s-5977s (1995), Couto et al., Cancer Res., 55(8):1717-22 (1995), Sandhu J S, Gene, 150(2):409-10 (1994), and Pedersen et al., J. Mol. Biol., 235(3):959-73 (1994), each of which is incorporated herein in its entirety by reference. Often, framework residues in the framework regions will be substituted with the corresponding residue from the CDR donor antibody to alter, for example improve, antigen binding. These framework substitutions are identified by methods well-known in the art, e.g., by modeling of the interactions of the CDR and framework residues to identify framework residues important for antigen binding and sequence comparison to identify unusual framework residues at particular positions. (See, e.g., Queen et al., U.S. Pat. No. 5,585,089; and Riechmann et al., 1988, Nature, 332:323, which are incorporated herein by reference in their entireties.)

[0447] A humanized antibody or antibody fragment has one or more amino acid residues remaining in it from a source which is nonhuman. These nonhuman amino acid residues are often referred to as “import” residues, which are typically taken from an “import” variable domain. As provided herein, humanized antibodies or antibody fragments comprise one or more CDRs from nonhuman immunoglobulin molecules and framework regions wherein the amino acid residues comprising the framework are derived completely or mostly from human germline. Multiple techniques for humanization of antibodies or antibody fragments are well-known in the art and can essentially be performed following the method of Winter and co-workers (Jones et al., Nature, 321:522-525 (1986); Riechmann et al., Nature, 332:323-327 (1988); Verhoeyen et al., Science, 239:1534-1536 (1988)), by substituting rodent CDRs or CDR sequences for the corresponding sequences of a human antibody, i.e., CDR-grafting (EP 239,400; PCT Publication No. WO 91/09967; and U.S. Pat. Nos. 4,816,567; 6,331,415; 5,225,539; 5,530,101; 5,585,089; 6,548,640, the contents of which are incorporated herein by reference herein in their entirety). In such humanized antibodies and antibody fragments, substantially less than an intact human variable domain has been substituted by the corresponding sequence from a nonhuman species. Humanized antibodies are often human antibodies in which some CDR residues and possibly some framework (FR) residues are substituted by residues from analogous sites in rodent antibodies. Humanization of antibodies and antibody fragments can also be achieved by veneering or resurfacing (EP 592,106; EP 519,596; Padlan, 1991, Molecular Immunology, 28(4/5):489-498; Studnicka et al., Protein Engineering, 7(6):805-814 (1994); and Roguska et al., PNAS, 91:969-973 (1994)) or chain shuffling (U.S. Pat. No. 5,565,332), the contents of which are incorporated herein by reference herein in their entirety.

[0448] The choice of human variable domains, both light and heavy, to be used in making the humanized antibodies is to reduce antigenicity. According to the so-called “best-fit” method, the sequence of the variable domain of a rodent antibody is screened against the entire library of known human variable-domain sequences. The human sequence which is closest to that of the rodent is then accepted as the human framework (FR) for the humanized antibody (Sims et al., J. Immunol., 151:2296 (1993); Chothia et al., J. Mol. Biol., 196:901 (1987), the contents of which are incorporated herein by reference herein in their entirety). Another method uses a particular framework derived from the consensus sequence of all human antibodies of a particular subgroup of light or heavy chains. The same framework may be used for several different humanized antibodies (see, e.g., Nicholson et al. Mol. Immun. 34 (16-17): 1157-1165 (1997); Carter et al., Proc. Natl. Acad. Sci. USA, 89:4285 (1992); Presta et al., J. Immunol., 151:2623 (1993), the contents of which are incorporated herein by reference herein in their entirety). In some embodiments, the framework region, e.g., all four framework regions, of the heavy chain variable region are derived from a VH4_4-59 germline sequence. In one embodiment, the framework region can comprise, one, two, three, four or five modifications, e.g., substitutions, e.g., from the amino acid at the corresponding murine sequence. In one embodiment, the framework region, e.g., all four framework regions of the light chain variable region are derived from a VK3_1.25 germline sequence. In one embodiment, the framework region can comprise, one, two, three, four or five modifications, e.g., substitutions, e.g., from the amino acid at the corresponding murine sequence.

[0449] In some aspects, the antibody fragment of a CAR is humanized with retention of high affinity for the target antigen and other favorable biological properties. According to one aspect of the invention, humanized antibodies and antibody fragments are prepared by a process of analysis of the parental sequences and various conceptual humanized products using three-dimensional models of the parental and humanized sequences. Three-dimensional immunoglobulin models are commonly available and are familiar to those skilled in the art. Computer programs are available which illustrate and display probable three-dimensional conformational structures of selected candidate immunoglobulin sequences. Inspection of these displays permits analysis of the likely role of the residues in the functioning of the candidate immunoglobulin sequence, e.g., the analysis of residues that influence the ability of the candidate immunoglobulin to bind the target antigen. In this way, FR residues can be selected and combined from the recipient and import sequences so that the desired antibody or antibody fragment characteristic, such as increased affinity for the target antigen, is achieved. In general, the CDR residues are directly and most substantially involved in influencing antigen binding.

[0450] A humanized antibody or antibody fragment may retain a similar antigenic specificity as the original antibody, e.g., in the present disclosure, the ability to bind human a tumor antigen as described herein. In some embodiments, a humanized antibody or antibody fragment may have improved affinity and/or specificity of binding to a tumor antigen as described herein. In some embodiments, a humanized antibody or antibody fragment may have lower affinity and/or specificity of a tumor antigen as described herein or a B cell antigen as described herein.

[0451] In one aspect, the antigen binding domain of the invention is characterized by particular functional features or properties of an antibody or antibody fragment. For example, in one aspect, the portion of a CAR of the invention that comprises an antigen binding domain specifically binds a tumor antigen as described herein.

[0452] In one aspect, the antigen binding domain is a fragment, e.g., a single chain variable fragment (scFv). In one aspect, the anti-tumor antigen as described herein binding domain is a Fv, a Fab, a (Fab′)2, or a bi-functional (e.g. bi-specific) hybrid antibody (e.g., Lanzavecchia et al., Eur. J. Immunol. 17, 105 (1987)). In one aspect, the antibodies and fragments thereof of the invention binds a tumor antigen as described herein protein with wild-type or enhanced affinity.

[0453] In some instances, scFvs can be prepared according to method known in the art (see, for example, Bird et al., (1988) Science 242:423-426 and Huston et al., (1988) Proc. Natl. Acad. Sci. USA 85:5879-5883). ScFv molecules can be produced by linking VH and VL regions together using flexible polypeptide linkers.

[0454] The scFv molecules comprise a linker (e.g., a Ser-Gly linker) with an optimized length and/or amino acid composition. The linker length can greatly affect how the variable regions of a scFv fold and interact. In fact, if a short polypeptide linker is employed (e.g., between 5-10 amino acids) intrachain folding is prevented. Interchain folding is also required to bring the two variable regions together to form a functional epitope binding site. For examples of linker orientation and size see, e.g., Hollinger et al. 1993 Proc Natl Acad. Sci. U.S.A. 90:6444-6448, U.S. Patent Application Publication Nos. 2005/0100543, 2005/0175606, 2007/0014794, and PCT publication Nos. WO2006/020258 and WO2007/024715, is incorporated herein by reference.

[0455] An scFv can comprise a linker of at least 1, 2, 3, 4, 5, 6, 7, 8, 9, 10, 11, 12, 13, 14, 15, 16, 17, 18, 19, 20, 25, 30, 35, 40, 45, 50, or more amino acid residues between its VL and VH regions. The linker sequence may comprise any naturally occurring amino acid. In some embodiments, the linker sequence comprises amino acids glycine and serine. In another embodiment, the linker sequence comprises sets of glycine and serine repeats such as (Gly₄Ser)ₙ, where n is a positive integer equal to or greater than 1 (SEQ ID NO:22). In one embodiment, the linker can be (Gly₄Ser)₄ (SEQ ID NO:29) or (Gly₄Ser)₃ (SEQ ID NO:30). Variation in the linker length may retain or enhance activity, giving rise to superior efficacy in activity studies.

[0456] In another aspect, the antigen binding domain is a T cell receptor (“TCR”), an engineered TCR, or a fragment thereof, for example, a single chain TCR (scTCR). Methods to make such TCRs are known in the art. See, e.g., Willemsen R A et al, Gene Therapy 7: 1369-1377 (2000); Zhang T et al, Cancer Gene Ther 11: 487-496 (2004); Aggen et al, Gene Ther. 19(4):365-74 (2012) (references are incorporated herein by its entirety). For example, scTCR can be engineered that contains the Vα and Vβ genes from a T cell clone linked by a linker (e.g., a flexible peptide). This approach is very useful to cancer associated target that itself is intracellular, however, a fragment of such antigen (peptide) is presented on the surface of the cancer cells by MHC.

[0457] In one aspect, the antigen binding domain of the CAR comprises an amino acid sequence that is homologous to an antigen binding domain amino acid sequence described herein, and the antigen binding domain retains the desired functional properties of the antigen binding domain described herein.

[0458] In one specific aspect, the antigen binding domain of the CAR comprises an antibody fragment. In a further aspect, the antibody fragment comprises a scFv. In a further aspect, the antibody fragment comprises a variable heavy chain (VH) only.

[0459] In various aspects, the antigen binding domain of the CAR is engineered by modifying one or more amino acids within one or both variable regions (e.g., VH and/or VL), for example within one or more CDR regions and/or within one or more framework regions. In one specific aspect, the CAR composition of the invention comprises an antibody fragment. In a further aspect, the antibody fragment comprises an scFv.

[0460] It will be understood by one of ordinary skill in the art that the antibody or antibody fragment of the invention may further be modified such that they vary in amino acid sequence (e.g., from wild-type), but not in desired activity. For example, additional nucleotide substitutions leading to amino acid substitutions at “non-essential” amino acid residues may be made to the protein. For example, a nonessential amino acid residue in a molecule may be replaced with another amino acid residue from the same side chain family. In another embodiment, a string of amino acids can be replaced with a structurally similar string that differs in order and/or composition of side chain family members, e.g., a conservative substitution, in which an amino acid residue is replaced with an amino acid residue having a similar side chain, may be made.

[0461] Families of amino acid residues having similar side chains have been defined in the art, including basic side chains (e.g., lysine, arginine, histidine), acidic side chains (e.g., aspartic acid, glutamic acid), uncharged polar side chains (e.g., glycine, asparagine, glutamine, serine, threonine, tyrosine, cysteine), nonpolar side chains (e.g., alanine, valine, leucine, isoleucine, proline, phenylalanine, methionine, tryptophan), beta-branched side chains (e.g., threonine, valine, isoleucine) and aromatic side chains (e.g., tyrosine, phenylalanine, tryptophan, histidine).

[0462] Percent identity in the context of two or more nucleic acids or polypeptide sequences, refers to two or more sequences that are the same. Two sequences are “substantially identical” if two sequences have a specified percentage of amino acid residues or nucleotides that are the same (e.g., 60% identity, optionally 70%, 71%, 72%, 73%, 74%, 75%, 76%, 77%, 78%, 79%, 80%, 81%, 82%, 83%, 84%, 85%, 86%, 87%, 88%, 89%, 90%, 91%, 92%, 93%, 94%, 95%, 96%, 97%, 98%, 99% identity over a specified region, or, when not specified, over the entire sequence), when compared and aligned for maximum correspondence over a comparison window, or designated region as measured using one of the following sequence comparison algorithms or by manual alignment and visual inspection. Optionally, the identity exists over a region that is at least about 50 nucleotides (or 10 amino acids) in length, or more preferably over a region that is 100 to 500 or 1000 or more nucleotides (or 20, 50, 200 or more amino acids) in length.

[0463] For sequence comparison, typically one sequence acts as a reference sequence, to which test sequences are compared. When using a sequence comparison algorithm, test and reference sequences are entered into a computer, subsequence coordinates are designated, if necessary, and sequence algorithm program parameters are designated. Default program parameters can be used, or alternative parameters can be designated. The sequence comparison algorithm then calculates the percent sequence identities for the test sequences relative to the reference sequence, based on the program parameters. Methods of alignment of sequences for comparison are well known in the art. Optimal alignment of sequences for comparison can be conducted, e.g., by the local homology algorithm of Smith and Waterman, (1970) Adv. Appl. Math. 2:482c, by the homology alignment algorithm of Needleman and Wunsch, (1970) J. Mol. Biol. 48:443, by the search for similarity method of Pearson and Lipman, (1988) Proc. Nat'l. Acad. Sci. USA 85:2444, by computerized implementations of these algorithms (GAP, BESTFIT, FASTA, and TFASTA in the Wisconsin Genetics Software Package, Genetics Computer Group, 575 Science Dr., Madison, Wis.), or by manual alignment and visual inspection (see, e.g., Brent et al., (2003) Current Protocols in Molecular Biology).

[0464] Two examples of algorithms that are suitable for determining percent sequence identity and sequence similarity are the BLAST and BLAST 2.0 algorithms, which are described in Altschul et al., (1977) Nuc. Acids Res. 25:3389-3402; and Altschul et al., (1990) J. Mol. Biol. 215:403-410, respectively. Software for performing BLAST analyses is publicly available through the National Center for Biotechnology Information.

[0465] The percent identity between two amino acid sequences can also be determined using the algorithm of E. Meyers and W. Miller, (1988) Comput. Appl. Biosci. 4:11-17) which has been incorporated into the ALIGN program (version 2.0), using a PAM120 weight residue table, a gap length penalty of 12 and a gap penalty of 4. In addition, the percent identity between two amino acid sequences can be determined using the Needleman and Wunsch (1970) J. Mol. Biol. 48:444-453) algorithm which has been incorporated into the GAP program in the GCG software package (available at www.gcg.com), using either a Blossom 62 matrix or a PAM250 matrix, and a gap weight of 16, 14, 12, 10, 8, 6, or 4 and a length weight of 1, 2, 3, 4, 5, or 6.

[0466] In one aspect, the present disclosure contemplates modifications of the starting antibody or fragment (e.g., scFv) amino acid sequence that generate functionally equivalent molecules. For example, the VH or VL of an antigen binding domain to a tumor antigen described herein, e.g., scFv, comprised in the CAR can be modified to retain at least about 70%, 71%. 72%. 73%, 74%, 75%, 76%, 77%, 78%, 79%, 80%, 81%, 82%, 83%, 84%, 85%, 86%, 87%, 88%, 89%, 90%, 91%, 92%, 93%, 94%, 95%, 96%, 97%, 98%, 99% identity of the starting VH or VL framework region of the antigen binding domain to the tumor antigen described herein, e.g., scFv. The present disclosure contemplates modifications of the entire CAR construct, e.g., modifications in one or more amino acid sequences of the various domains of the CAR construct in order to generate functionally equivalent molecules. The CAR construct can be modified to retain at least about 70%, 71%. 72%. 73%, 74%, 75%, 76%, 77%, 78%, 79%, 80%, 81%, 82%, 83%, 84%, 85%, 86%, 87%, 88%, 89%, 90%, 91%, 92%, 93%, 94%, 95%, 96%, 97%, 98%, 99% identity of the starting CAR construct.

[0467] Bispecific CARs

[0468] In an embodiment a multispecific antibody molecule is a bispecific antibody molecule. A bispecific antibody has specificity for no more than two antigens. A bispecific antibody molecule is characterized by a first immunoglobulin variable domain sequence which has binding specificity for a first epitope and a second immunoglobulin variable domain sequence that has binding specificity for a second epitope. In an embodiment the first and second epitopes are on the same antigen, e.g., the same protein (or subunit of a multimeric protein). In an embodiment the first and second epitopes overlap. In an embodiment the first and second epitopes do not overlap. In an embodiment the first and second epitopes are on different antigens, e.g., different proteins (or different subunits of a multimeric protein). In an embodiment a bispecific antibody molecule comprises a heavy chain variable domain sequence and a light chain variable domain sequence which have binding specificity for a first epitope and a heavy chain variable domain sequence and a light chain variable domain sequence which have binding specificity for a second epitope. In an embodiment a bispecific antibody molecule comprises a half antibody having binding specificity for a first epitope and a half antibody having binding specificity for a second epitope. In an embodiment a bispecific antibody molecule comprises a half antibody, or fragment thereof, having binding specificity for a first epitope and a half antibody, or fragment thereof, having binding specificity for a second epitope. In an embodiment a bispecific antibody molecule comprises a scFv, or fragment thereof, have binding specificity for a first epitope and a scFv, or fragment thereof, have binding specificity for a second epitope.

[0469] In certain embodiments, the antibody molecule is a multi-specific (e.g., a bispecific or a trispecific) antibody molecule. Protocols for generating bispecific or heterodimeric antibody molecules are known in the art; including but not limited to, for example, the “knob in a hole” approach described in, e.g., U.S. Pat. No. 5,731,168; the electrostatic steering Fc pairing as described in, e.g., WO 09/089004, WO 06/106905 and WO 2010/129304; Strand Exchange Engineered Domains (SEED) heterodimer formation as described in, e.g., WO 07/110205; Fab arm exchange as described in, e.g., WO 08/119353, WO 2011/131746, and WO 2013/060867; double antibody conjugate, e.g., by antibody cross-linking to generate a bi-specific structure using a heterobifunctional reagent having an amine-reactive group and a sulfhydryl reactive group as described in, e.g., U.S. Pat. No. 4,433,059; bispecific antibody determinants generated by recombining half antibodies (heavy-light chain pairs or Fabs) from different antibodies through cycle of reduction and oxidation of disulfide bonds between the two heavy chains, as described in, e.g., U.S. Pat. No. 4,444,878; trifunctional antibodies, e.g., three Fab′ fragments cross-linked through sulfhdryl reactive groups, as described in, e.g., U.S. Pat. No. 5,273,743; biosynthetic binding proteins, e.g., pair of scFvs cross-linked through C-terminal tails preferably through disulfide or amine-reactive chemical cross-linking, as described in, e.g., U.S. Pat. No. 5,534,254; bifunctional antibodies, e.g., Fab fragments with different binding specificities dimerized through leucine zippers (e.g., c-fos and c-jun) that have replaced the constant domain, as described in, e.g., U.S. Pat. No. 5,582,996; bispecific and oligospecific mono- and oligovalent receptors, e.g., VH-CH1 regions of two antibodies (two Fab fragments) linked through a polypeptide spacer between the CH1 region of one antibody and the VH region of the other antibody typically with associated light chains, as described in, e.g., U.S. Pat. No. 5,591,828; bispecific DNA-antibody conjugates, e.g., crosslinking of antibodies or Fab fragments through a double stranded piece of DNA, as described in, e.g., U.S. Pat. No. 5,635,602; bispecific fusion proteins, e.g., an expression construct containing two scFvs with a hydrophilic helical peptide linker between them and a full constant region, as described in, e.g., U.S. Pat. No. 5,637,481; multivalent and multispecific binding proteins, e.g., dimer of polypeptides having first domain with binding region of Ig heavy chain variable region, and second domain with binding region of Ig light chain variable region, generally termed diabodies (higher order structures are also encompassed creating for bispecific, trispecific, or tetraspecific molecules, as described in, e.g., U.S. Pat. No. 5,837,242; minibody constructs with linked VL and VH chains further connected with peptide spacers to an antibody hinge region and CH3 region, which can be dimerized to form bispecific/multivalent molecules, as described in, e.g., U.S. Pat. No. 5,837,821; VH and VL domains linked with a short peptide linker (e.g., 5 or 10 amino acids) or no linker at all in either orientation, which can form dimers to form bispecific diabodies; trimers and tetramers, as described in, e.g., U.S. Pat. No. 5,844,094; String of VH domains (or VL domains in family members) connected by peptide linkages with crosslinkable groups at the C-terminus further associated with VL domains to form a series of FVs (or scFvs), as described in, e.g., U.S. Pat. No. 5,864,019; and single chain binding polypeptides with both a VH and a VL domain linked through a peptide linker are combined into multivalent structures through non-covalent or chemical crosslinking to form, e.g., homobivalent, heterobivalent, trivalent, and tetravalent structures using both scFV or diabody type format, as described in, e.g., U.S. Pat. No. 5,869,620. Additional exemplary multispecific and bispecific molecules and methods of making the same are found, for example, in U.S. Pat. Nos. 5,910,573, 5,932,448, 5,959,083, 5,989,830, 6,005,079, 6,239,259, 6,294,353, 6,333,396, 6,476,198, 6,511,663, 6,670,453, 6,743,896, 6,809,185, 6,833,441, 7,129,330, 7,183,076, 7,521,056, 7,527,787, 7,534,866, 7,612,181, US2002004587A1, US2002076406A1, US2002103345A1, US2003207346A1, US2003211078A1, US2004219643A1, US2004220388A1, US2004242847A1, US2005003403A1, US2005004352A1, US2005069552A1, US2005079170A1, US2005100543A1, US2005136049A1, US2005136051A1, US2005163782A1, US2005266425A1, US2006083747A1, US2006120960A1, US2006204493A1, US2006263367A1, US2007004909A1, US2007087381A1, US2007128150A1, US2007141049A1, US2007154901A1, US2007274985A1, US2008050370A1, US2008069820A1, US2008152645A1, US2008171855A1, US2008241884A1, US2008254512A1, US2008260738A1, US2009130106A1, US2009148905A1, US2009155275A1, US2009162359A1, US2009162360A1, US2009175851A1, US2009175867A1, US2009232811A1, US2009234105A1, US2009263392A1, US2009274649A1, EP346087A2, WO0006605A2, WO02072635A2, WO04081051A1, WO06020258A2, WO2007044887A2, WO2007095338A2, WO2007137760A2, WO2008119353A1, WO2009021754A2, WO2009068630A1, WO9103493A1, WO9323537A1, WO9409131A1, WO9412625A2, WO9509917A1, WO9637621A2, WO9964460A1. The contents of the above-referenced applications are incorporated herein by reference in their entireties.

[0470] Within each antibody or antibody fragment (e.g., scFv) of a bispecific antibody molecule, the VH can be upstream or downstream of the VL. In some embodiments, the upstream antibody or antibody fragment (e.g., scFv) is arranged with its VH (VH₁) upstream of its VL (VL₁) and the downstream antibody or antibody fragment (e.g., scFv) is arranged with its VL (VL2) upstream of its VH (VH₂), such that the overall bispecific antibody molecule has the arrangement VH₁-VL₁-VL₂-VH₂. In other embodiments, the upstream antibody or antibody fragment (e.g., scFv) is arranged with its VL (VL₁) upstream of its VH (VH₁) and the downstream antibody or antibody fragment (e.g., scFv) is arranged with its VH (VH₂) upstream of its VL (VL₂), such that the overall bispecific antibody molecule has the arrangement VL₁-VH₁-VH₂-VL₂. Optionally, a linker is disposed between the two antibodies or antibody fragments (e.g., scFvs), e.g., between VL₁ and VL₂ if the construct is arranged as VH₁-VL₁-VL₂-VH₂, or between VH₁ and VH₂ if the construct is arranged as VL₁-VH₁-VH₂-VL₂. The linker may be a linker as described herein, e.g., a (Gly₄-Ser)n linker, wherein n is 1, 2, 3, 4, 5, or 6, preferably 4 (SEQ ID NO: 967). In general, the linker between the two scFvs should be long enough to avoid mispairing between the domains of the two scFvs. Optionally, a linker is disposed between the VL and VH of the first scFv. Optionally, a linker is disposed between the VL and VH of the second scFv. In constructs that have multiple linkers, any two or more of the linkers can be the same or different. Accordingly, in some embodiments, a bispecific CAR comprises VLs, VHs, and optionally one or more linkers in an arrangement as described herein.

[0471] In one aspect, the chimeric antigen receptor comprises a bispecific antigen binding domain, a transmembrane domain (e.g., as described herein), and an intracellular signaling domain (e.g., as described herein). In embodiments, the bispecific antigen binding domain comprises a first immunoglobulin variable domain sequence, e.g., an scFv (or comprises the light chain CDRs and/or heavy chain CDRs from a scFv described herein), which binds an antigen, e.g., as described herein, e.g., (a CD19 binding domain or BCMA binding domain described herein, e.g., in Table 6 or Table 12), and a second immunoglobulin variable domain sequence, e.g., a scFv (or comprises the light chain CDRs and/or heavy chain CDRs from a scFv described herein), which has binding specificity for one or more antigens described herein, e.g., comprises a scFv as described herein, e.g., comprising a mesothelin binding domain or EGFRvIII binding domain (e.g., as described in Table 2 or Table 5). In embodiments, the bispecific antigen binding domain comprises a CD19 binding domain described herein and a mesothelin binding domain described herein. In embodiments, the bispecific antigen binding domain comprises a BCMA binding domain described herein and a mesothelin binding domain described herein. In embodiments, the bispecific antigen binding domain comprises a CD19 binding domain described herein and a EGFRvIII binding domain described herein. In embodiments, the bispecific antigen binding domain comprises a BCMA binding domain described herein and a EGFRvIII binding domain described herein. In another aspect, the invention provides a cell (e.g., a population of cells), e.g., an immune effector cell, e.g., a T cell or NK cell, e.g., as described herein, which is engineered to express (e.g., comprises) a bispecific CAR as described herein, e.g., a bispecific CAR comprising two antigen binding domains described herein. Without being bound by any theory, it is believed that cells expressing such bispecific CARs (e.g., comprising a two antigen binding domains, e.g., as described herein) are useful in the methods and compositions described herein.

[0472] Chimeric TCR

[0473] In one aspect, the antigen binding domains described herein, e.g., the antibodies and antibody fragments, e.g., provided in the Tables herein, can be grafted to one or more constant domain of a T cell receptor

[0474] (“TCR”) chain, for example, a TCR alpha or TCR beta chain, to create an chimeric TCR that binds specificity to a tumor antigen described herein. Without being bound by theory, it is believed that chimeric TCRs will signal through the TCR complex upon antigen binding. For example, a mesothelin or CD19 scFv or a fragment there of, e.g., a VL domain, or VH domain, as disclosed herein, can be grafted to the constant domain, e.g., at least a portion of the extracellular constant domain, the transmembrane domain and the cytoplasmic domain, of a TCR chain, for example, the TCR alpha chain and/or the TCR beta chain. As another example, the CDRs of an antibody or antibody fragment, e.g., the CDRs of any antibody or antibody fragment as described in Tables provided herein may be grafted into a TCR alpha and/or beta chain to create a chimeric TCR that binds specifically to a tumor antigen described herein. For example, the LCDRs disclosed herein may be grafted into the variable domain of a TCR alpha chain and the HCDRs disclosed herein may be grafted to the variable domain of a TCR beta chain, or vice versa. Such chimeric TCRs may be produced by methods known in the art (For example, Willemsen R A et al, Gene Therapy 2000; 7: 1369-1377; Zhang T et al, Cancer Gene Ther 2004; 11: 487-496; Aggen et al, Gene Ther. 2012 April; 19(4):365-74).

[0475] Transmembrane Domain

[0476] With respect to the transmembrane domain, in various embodiments, a CAR can be designed to comprise a transmembrane domain that is attached to the extracellular domain of the CAR, e.g., the antigen binding domain. A transmembrane domain can include one or more additional amino acids adjacent to the transmembrane region, e.g., one or more amino acid associated with the extracellular region of the protein from which the transmembrane was derived (e.g., 1, 2, 3, 4, 5, 6, 7, 8, 9, 10 up to 15 amino acids of the extracellular region) and/or one or more additional amino acids associated with the intracellular region of the protein from which the transmembrane protein is derived (e.g., 1, 2, 3, 4, 5, 6, 7, 8, 9, 10 up to 15 amino acids of the intracellular region). In one aspect, the transmembrane domain is one that is associated with one of the other domains of the CAR, for example, the transmembrane domain is from the same protein as the intracellular signalling domain, e.g., the costimulatory domain. In some instances, the transmembrane domain can be selected or modified by amino acid substitution to avoid binding of such domains to the transmembrane domains of the same or different surface membrane proteins, e.g., to minimize interactions with other members of the receptor complex. In one aspect, the transmembrane domain is capable of homodimerization with another CAR on the cell surface of a CAR-expressing cell. In a different aspect, the amino acid sequence of the transmembrane domain may be modified or substituted so as to minimize interactions with the binding domains of the native binding partner present in the same CAR-expressing cell.

[0477] The transmembrane domain may be derived either from a natural or from a recombinant source. Where the source is natural, the domain may be derived from any membrane-bound or transmembrane protein. In one aspect the transmembrane domain is capable of signaling to the intracellular domain(s) whenever the CAR has bound to a target. A transmembrane domain of particular use in this invention may include at least the transmembrane region(s) of e.g., the alpha, beta or zeta chain of the T-cell receptor, CD28, CD27, CD3 epsilon, CD45, CD4, CD5, CD8, CD9, CD16, CD22, CD33, CD37, CD64, CD80, CD86, CD134, CD137, CD154. In some embodiments, a transmembrane domain may include at least the transmembrane region(s) of, e.g., KIRDS2, OX40, CD2, CD27, LFA-1 (CD11a, CD18), ICOS (CD278), 4-1BB (CD137), GITR, CD40, BAFFR, HVEM (LIGHTR), SLAMF7, NKp80 (KLRF1), NKp44, NKp30, NKp46, CD160, CD19, IL2R beta, IL2R gamma, IL7R α, ITGA1, VLA1, CD49a, ITGA4, IA4, CD49D, ITGA6, VLA-6, CD49f, ITGAD, CD11d, ITGAE, CD103, ITGAL, CD11a, LFA-1, ITGAM, CD11b, ITGAX, CD11c, ITGB1, CD29, ITGB2, CD18, LFA-1, ITGB7, TNFR2, DNAM1 (CD226), SLAMF4 (CD244, 2B4), CD84, CD96 (Tactile), CEACAM1, CRTAM, Ly9 (CD229), CD160 (BY55), PSGL1, CD100 (SEMA4D), SLAMF6 (NTB-A, Ly108), SLAM (SLAMF1, CD150, IPO-3), BLAME (SLAMF8), SELPLG (CD162), LTBR, PAG/Cbp, NKG2D, NKG2C.

[0478] In some instances, the transmembrane domain can be attached to the extracellular region of the CAR, e.g., the antigen binding domain of the CAR, via a hinge, e.g., a hinge from a human protein. For example, in one embodiment, the hinge can be a human Ig (immunoglobulin) hinge, e.g., an IgG4 hinge, or a CD8a hinge. In one embodiment, the hinge or spacer comprises (e.g., consists of) the amino acid sequence of SEQ ID NO:4. In one aspect, the transmembrane domain comprises (e.g., consists of) a transmembrane domain of SEQ ID NO: 12.

[0479] In one aspect, the hinge or spacer comprises an IgG4 hinge. For example, in one embodiment, the hinge or spacer comprises a hinge of the amino acid sequence SEQ ID NO: 6. In some embodiments, the hinge or spacer comprises a hinge encoded by a nucleotide sequence of SEQ ID NO: 7. In one aspect, the hinge or spacer comprises an IgD hinge. For example, in one embodiment, the hinge or spacer comprises a hinge of the amino acid sequence SEQ ID NO: 8. In some embodiments, the hinge or spacer comprises a hinge encoded by a nucleotide sequence of SEQ ID NO: 9.

[0480] In one aspect, the transmembrane domain may be recombinant, in which case it will comprise predominantly hydrophobic residues such as leucine and valine. In one aspect a triplet of phenylalanine, tryptophan and valine can be found at each end of a recombinant transmembrane domain.

[0481] Optionally, a short oligo- or polypeptide linker, between 2 and 10 amino acids in length may form the linkage between the transmembrane domain and the cytoplasmic region of the CAR. A glycine-serine doublet provides a particularly suitable linker. For example, in one aspect, the linker comprises the amino acid sequence of GGGGSGGGGS (SEQ ID NO:10). In some embodiments, the linker is encoded by a nucleotide sequence of GGTGGCGGAGGTTCTGGAGGTGGAGGTTCC (SEQ ID NO:11).

[0482] In one aspect, the hinge or spacer comprises a KIR2DS2 hinge.

[0483] Cytoplasmic Domain

[0484] The cytoplasmic domain or region of the CAR includes an intracellular signaling domain. An intracellular signaling domain is generally responsible for activation of at least one of the normal effector functions of the immune cell in which the CAR has been introduced. The term “effector function” refers to a specialized function of a cell. Effector function of a T cell, for example, may be cytolytic activity or helper activity including the secretion of cytokines. Thus the term “intracellular signaling domain” refers to the portion of a protein which transduces the effector function signal and directs the cell to perform a specialized function. While usually the entire intracellular signaling domain can be employed, in many cases it is not necessary to use the entire chain. To the extent that a truncated portion of the intracellular signaling domain is used, such truncated portion may be used in place of the intact chain as long as it transduces the effector function signal. The term intracellular signaling domain is thus meant to include any truncated portion of the intracellular signaling domain sufficient to transduce the effector function signal.

[0485] Examples of intracellular signaling domains for use in the CAR of the invention include the cytoplasmic sequences of the T cell receptor (TCR) and co-receptors that act in concert to initiate signal transduction following antigen receptor engagement, as well as any derivative or variant of these sequences and any recombinant sequence that has the same functional capability.

[0486] It is known that signals generated through the TCR alone are insufficient for full activation of the T cell and that a secondary and/or costimulatory signal is also required. Thus, T cell activation can be said to be mediated by two distinct classes of cytoplasmic signaling sequences: those that initiate antigen-dependent primary activation through the TCR (primary intracellular signaling domains) and those that act in an antigen-independent manner to provide a secondary or costimulatory signal (secondary cytoplasmic domain, e.g., a costimulatory domain).

[0487] A primary signaling domain regulates primary activation of the TCR complex either in a stimulatory way, or in an inhibitory way. Primary intracellular signaling domains that act in a stimulatory manner may contain signaling motifs which are known as immunoreceptor tyrosine-based activation motifs or ITAMs.

[0488] Examples of ITAM containing primary intracellular signaling domains that are of particular use in the invention include those of TCR zeta, FcR gamma, FcR beta, CD3 gamma, CD3 delta, CD3 epsilon, CD5, CD22, CD79a, CD79b, CD278 (also known as “ICOS”), FcεRI, DAP10, DAP12, and CD66d. In one embodiment, a CAR of the invention comprises an intracellular signaling domain, e.g., a primary signaling domain of CD3-zeta, e.g., a CD3-zeta sequence described herein.

[0489] In one embodiment, a primary signaling domain comprises a modified ITAM domain, e.g., a mutated ITAM domain which has altered (e.g., increased or decreased) activity as compared to the native ITAM domain. In one embodiment, a primary signaling domain comprises a modified ITAM-containing primary intracellular signaling domain, e.g., an optimized and/or truncated ITAM-containing primary intracellular signaling domain. In an embodiment, a primary signaling domain comprises one, two, three, four or more ITAM motifs.

[0490] The intracellular signaling domain of the CAR can comprise the CD3-zeta signaling domain by itself or it can be combined with any other desired intracellular signaling domain(s) useful in the context of a CAR of the invention. For example, the intracellular signaling domain of the CAR can comprise a CD3 zeta chain portion and a costimulatory signaling domain. The costimulatory signaling domain refers to a portion of the CAR comprising the intracellular domain of a costimulatory molecule. A costimulatory molecule is a cell surface molecule other than an antigen receptor or its ligands that is required for an efficient response of lymphocytes to an antigen. Examples of such molecules include CD27, CD28, 4-1BB (CD137), OX40, CD30, CD40, PD-1, ICOS, lymphocyte function-associated antigen-1 (LFA-1), CD2, CD7, LIGHT, NKG2C, B7-H3, and a ligand that specifically binds with CD83, and the like. For example, CD27 costimulation has been demonstrated to enhance expansion, effector function, and survival of human CART cells in vitro and augments human T cell persistence and antitumor activity in vivo (Song et al. Blood. 2012; 119(3):696-706). Further examples of such costimulatory molecules include an MHC class I molecule, a TNF receptor protein, an Immunoglobulin-like protein, a cytokine receptor, an integrin, a signaling lymphocytic activation molecule (SLAM protein), an activating NK cell receptor, BTLA, a Toll ligand receptor, OX40, CD2, CD7, CD27, CD28, CD30, CD40, CDS, ICAM-1, LFA-1 (CD11a/CD18), 4-1BB (CD137), B7-H3, CDS, ICAM-1, ICOS (CD278), GITR, BAFFR, LIGHT, HVEM (LIGHTR), KIRDS2, SLAMF7, NKp80 (KLRF1), NKp44, NKp30, NKp46, CD19, CD4, CD8alpha, CD8beta, IL2R beta, IL2R gamma, IL7R alpha, ITGA4, VLA1, CD49a, ITGA4, IA4, CD49D, ITGA6, VLA-6, CD49f, ITGAD, CD11d, ITGAE, CD103, ITGAL, CD11a, LFA-1, ITGAM, CD11 b, ITGAX, CD11c, ITGB1, CD29, ITGB2, CD18, LFA-1, ITGB7, NKG2D, NKG2C, TNFR2, TRANCE/RANKL, DNAM1 (CD226), SLAMF4 (CD244, 2B4), CD84, CD96 (Tactile), CEACAM1, CRTAM, Ly9 (CD229), CD160 (BY55), PSGL1, CD100 (SEMA4D), CD69, SLAMF6 (NTB-A, Ly108), SLAM (SLAMF1, CD150, IPO-3), BLAME (SLAMF8), SELPLG (CD162), LTBR, LAT, GADS, SLP-76, PAG/Cbp, CD19a, and a ligand that specifically binds with CD83.

[0491] The intracellular signaling sequences within the cytoplasmic portion of the CAR of the invention may be linked to each other in a random or specified order. Optionally, a short oligo- or polypeptide linker, for example, between 2 and 10 amino acids (e.g., 2, 3, 4, 5, 6, 7, 8, 9, or 10 amino acids) in length may form the linkage between intracellular signaling sequence. In one embodiment, a glycine-serine doublet can be used as a suitable linker. In one embodiment, a single amino acid, e.g., an alanine, a glycine, can be used as a suitable linker.

[0492] In one aspect, the intracellular signaling domain is designed to comprise two or more, e.g., 2, 3, 4, 5, or more, costimulatory signaling domains. In an embodiment, the two or more, e.g., 2, 3, 4, 5, or more, costimulatory signaling domains, are separated by a linker molecule, e.g., a linker molecule described herein. In one embodiment, the intracellular signaling domain comprises two costimulatory signaling domains. In some embodiments, the linker molecule is a glycine residue. In some embodiments, the linker is an alanine residue.

[0493] In one aspect, the intracellular signaling domain is designed to comprise the signaling domain of CD3-zeta and the signaling domain of CD28. In one aspect, the intracellular signaling domain is designed to comprise the signaling domain of CD3-zeta and the signaling domain of 4-1BB. In one aspect, the signaling domain of 4-1BB is a signaling domain of SEQ ID NO: 14. In one aspect, the signaling domain of CD3-zeta is a signaling domain of SEQ ID NO: 18.

[0494] In one aspect, the intracellular signaling domain is designed to comprise the signaling domain of CD3-zeta and the signaling domain of CD27. In one aspect, the signaling domain of CD27 comprises an amino acid sequence of SEQ ID NO:16. In one aspect, the signalling domain of CD27 is encoded by a nucleic acid sequence of SEQ ID NO:17.

[0495] In one aspect, the intracellular is designed to comprise the signaling domain of CD3-zeta and the signaling domain of CD28. In one aspect, the signaling domain of CD28 comprises an amino acid sequence of SEQ ID NO: 124. In one aspect, the signaling domain of CD28 is encoded by a nucleic acid sequence of SEQ ID NO: 1113.

[0496] In one aspect, the intracellular is designed to comprise the signaling domain of CD3-zeta and the signaling domain of ICOS. In one aspect, the signaling domain of ICOS comprises an amino acid sequence of SEQ ID NO: 120. In one aspect, the signaling domain of ICOS is encoded by a nucleic acid sequence of SEQ ID NO: 1111.

[0497] In one aspect, the cell of the invention, e.g., described herein, e.g., a cell expressing two different CARs, includes CARs that each include an antigen binding domain that binds a target antigen described herein, a transmembrane domain, a primary signaling domain, and a costimulatory signaling domain. In embodiments of the aforementioned aspect, the costimulatory domain of the two different CARs may be the same or different. In embodiments, one or more of the two different CARs comprise more than one costimulatory signalling domains. In other aspects, the cell of the invention, e.g., described herein, e.g., a cell expressing two different CARs, includes a first CAR that includes an antigen binding domain that binds a target antigen described herein, a transmembrane domain, a primary signaling domain, but does not include a costimulatory signaling domain, and a second CAR that includes an antigen binding domain that binds a target antigen described herein, a transmembrane domain, and a costimulatory signaling domain, but does not include a primary signaling domain.

[0498] In one aspect, the CAR-expressing cell described herein, e.g. a cell expressing two different CARs can further comprise another, e.g., a third, CAR, e.g., another CAR that includes a different antigen binding domain, e.g., to the same target or a different target (e.g., a target other than a tumor antigen described herein or a different tumor antigen described herein). For example, in an embodiment where the cell of the invention expresses a third CAR comprising an antigen binding domain that binds a second target tumor antigen, the third CAR includes an antigen binding domain to a target expressed the same cancer cell type as the tumor antigen targeted by the first or second CAR. In one embodiment, the CAR-expressing cell comprises a first CAR that targets a first tumor antigen and includes an intracellular signaling domain having a costimulatory signaling domain but not a primary signaling domain, and a third

[0499] CAR that targets a second, different, tumor antigen and includes an intracellular signaling domain having a primary signaling domain but not a costimulatory signaling domain. While not wishing to be bound by theory, placement of a costimulatory signaling domain, e.g., 4-1BB, CD28, CD27 or OX-40, onto the first CAR, and the primary signaling domain, e.g., CD3 zeta, on the third CAR can limit the CAR activity to cells where both targets are expressed. In one embodiment, the cell of the invention comprises a first CAR that includes an antigen binding domain that binds a target antigen described herein, a transmembrane domain and a costimulatory domain and a second CAR that targets a different target antigen (e.g., an antigen expressed on that same cancer cell type as the first target antigen) and includes an antigen binding domain, a transmembrane domain and a primary signaling domain. In another embodiment, the cell of the invention comprises (i.e., is genetically engineered to express) a first CAR that includes an antigen binding domain that binds a target antigen described herein, a transmembrane domain and a primary signaling domain and a second CAR that targets a tumor antigen other than the first target antigen (e.g., an antigen expressed on the same cancer cell type as the first target antigen) and includes an antigen binding domain to the antigen, a transmembrane domain and a costimulatory signaling domain. In another embodiment, the cell of the invention comprises (i.e., is genetically engineered to express) a first CAR that includes an antigen binding domain that binds a target antigen described herein, a transmembrane domain, a costimulatory signaling domain and a primary signaling domain, and a second CAR that targets a tumor antigen other than the first target antigen (e.g., an antigen expressed on the same cancer cell type as the first target antigen) and includes an antigen binding domain to the antigen, a transmembrane domain, a costimulatory signaling domain and a primary signaling domain. In embodiments where both the first and second CAR include a costimulatory signaling domain, the costimulatory signaling domain of the first CAR and the second CAR may be derived from the same protein, e.g., from a costimulatory protein described herein, e.g., 4-1BB, CD28, or ICOS. In other embodiments, the costimulatory signaling domain of the first CAR and the second CAR may be derived from the different proteins, e.g., the first CAR includes a costimulatory signaling domain described herein, e.g., of 4-1BB, and the second CAR includes a different costimulatory signaling domain described herein, e.g., of CD28.

[0500] In one embodiment, the CAR-expressing cell comprises a CAR comprising antigen binding domain that bind target antigens described herein and an inhibitory CAR. In one embodiment, the inhibitory CAR comprises an antigen binding domain that binds an antigen found on normal cells but not cancer cells, e.g., normal cells that also express the tumor antigens targeted by the CAR comprising an antigen binding domain that binds a target antigen. In one embodiment, the inhibitory CAR comprises the antigen binding domain, a transmembrane domain and an intracellular domain of an inhibitory molecule. For example, the intracellular domain of the inhibitory CAR can be an intracellular domain of PD1, PD-L1, CTLA4, TIM3, LAGS, VISTA, BTLA, TIGIT, LAIR1, CD160, 2B4, CD80, CD86, B7-H3 (CD276), B7-H4 (VTCN1), HVEM (TNFRSF14 or CD270), KIR, A2aR, MHC class I, MHC class II, GAL9, adenosine, or TGFR beta.

[0501] In one embodiment, the antigen binding domains of the different CARs can be such that the antigen binding domains do not interact with one another. For example, a cell expressing a first and second CAR can have an antigen binding domain of the first CAR, e.g., as a fragment, e.g., an scFv, that does not form an association with the antigen binding domain of the second CAR, e.g., the antigen binding domain of the second CAR is a VHH.

[0502] In some embodiments, the antigen binding domain comprises a single domain antigen binding (SDAB) molecules include molecules whose complementary determining regions are part of a single domain polypeptide. Examples include, but are not limited to, heavy chain variable domains, binding molecules naturally devoid of light chains, single domains derived from conventional 4-chain antibodies, engineered domains and single domain scaffolds other than those derived from antibodies. SDAB molecules may be any of the art, or any future single domain molecules. SDAB molecules may be derived from any species including, but not limited to mouse, human, camel, llama, lamprey, fish, shark, goat, rabbit, and bovine. This term also includes naturally occurring single domain antibody molecules from species other than Camelidae and sharks.

[0503] In one aspect, an SDAB molecule can be derived from a variable region of the immunoglobulin found in fish, such as, for example, that which is derived from the immunoglobulin isotype known as Novel Antigen Receptor (NAR) found in the serum of shark. Methods of producing single domain molecules derived from a variable region of NAR (“IgNARs”) are described in WO 03/014161 and Streltsov (2005) Protein Sci. 14:2901-2909.

[0504] According to another aspect, an SDAB molecule is a naturally occurring single domain antigen binding molecule known as heavy chain devoid of light chains. Such single domain molecules are disclosed in WO 9404678 and Hamers-Casterman, C. et al. (1993) Nature 363:446-448, for example. For clarity reasons, this variable domain derived from a heavy chain molecule naturally devoid of light chain is known herein as a VHH or nanobody to distinguish it from the conventional VH of four chain immunoglobulins. Such a VHH molecule can be derived from Camelidae species, for example in camel, llama, dromedary, alpaca and guanaco. Other species besides Camelidae may produce heavy chain molecules naturally devoid of light chain; such VHHs are within the scope of the invention.

[0505] The SDAB molecules can be recombinant, CDR-grafted, humanized, camelized, de-immunized and/or in vitro generated (e.g., selected by phage display).

[0506] It has also been discovered, that cells having a plurality of chimeric membrane embedded receptors comprising an antigen binding domain that interactions between the antigen binding domain of the receptors can be undesirable, e.g., because it inhibits the ability of one or more of the antigen binding domains to bind its cognate antigen. Accordingly, disclosed herein are cells having a first and a second non-naturally occurring chimeric membrane embedded receptor comprising antigen binding domains that minimize such interactions. Also disclosed herein are nucleic acids encoding a first and a second non-naturally occurring chimeric membrane embedded receptor comprising a antigen binding domains that minimize such interactions, as well as methods of making and using such cells and nucleic acids. In an embodiment the antigen binding domain of one of said first said second non-naturally occurring chimeric membrane embedded receptor, comprises an scFv, and the other comprises a single VH domain, e.g., a camelid, shark, or lamprey single VH domain, or a single VH domain derived from a human or mouse sequence.

[0507] In another aspect, the CAR-expressing cell described herein can further express another agent, e.g., an agent which enhances the activity of a CAR-expressing cell. For example, in one embodiment, the agent can be an agent which inhibits an inhibitory molecule. Inhibitory molecules, e.g., PD1, can, in some embodiments, decrease the ability of a CAR-expressing cell to mount an immune effector response. Examples of inhibitory molecules include PD1, PD-L1, CTLA4, TIM3, CEACAM (e.g., CEACAM-1, CEACAM-3 and/or CEACAM-5), LAG3, VISTA, BTLA, TIGIT, LAIR1, CD160, 2B4, CD80, CD86, B7-H3 (CD276), B7-H4 (VTCN1), HVEM (TNFRSF14 or CD270), KIR, A2aR, MHC class I, MHC class II, GAL9, adenosine, and TGFR beta.

[0508] In one embodiment, the agent which inhibits an inhibitory molecule, e.g., is a molecule described herein, e.g., an agent that comprises a first polypeptide, e.g., an inhibitory molecule, associated with a second polypeptide that provides a positive signal to the cell, e.g., an intracellular signaling domain described herein. In one embodiment, the agent comprises a first polypeptide, e.g., of an inhibitory molecule such as PD1, PD-L1, CTLA4, TIM3, CEACAM (e.g., CEACAM-1, CEACAM-3 and/or CEACAM-5), LAG3, VISTA, BTLA, TIGIT, LAIR1, CD160, 2B4, CD80, CD86, B7-H3 (CD276), B7-H4 (VTCN1), HVEM (TNFRSF14 or CD270), KIR, A2aR, MHC class I, MHC class II, GAL9, adenosine, and TGFR beta, or a fragment of any of these (e.g., at least a portion of an extracellular domain of any of these), and a second polypeptide which is an intracellular signaling domain described herein (e.g., comprising a costimulatory domain (e.g., 41BB, CD27 or CD28, e.g., as described herein) and/or a primary signaling domain (e.g., a CD3 zeta signaling domain described herein). In one embodiment, the agent comprises a first polypeptide of PD1 or a fragment thereof (e.g., at least a portion of an extracellular domain of PD1), and a second polypeptide of an intracellular signaling domain described herein (e.g., a CD28 signaling domain described herein and/or a CD3 zeta signaling domain described herein). PD1 is an inhibitory member of the CD28 family of receptors that also includes CD28, CTLA-4, ICOS, and BTLA. PD-1 is expressed on activated B cells, T cells and myeloid cells (Agata et al. 1996 Int. Immunol 8:765-75). Two ligands for PD1, PD-L1 and PD-L2 have been shown to downregulate T cell activation upon binding to PD1 (Freeman et a. 2000 J Exp Med 192:1027-34; Latchman et al. 2001 Nat Immunol 2:261-8; Carter et al. 2002 Eur J Immunol 32:634-43). PD-L1 is abundant in human cancers (Dong et al. 2003 J Mol Med 81:281-7; Blank et al. 2005 Cancer Immunol. Immunother 54:307-314; Konishi et al. 2004 Clin Cancer Res 10:5094). Immune suppression can be reversed by inhibiting the local interaction of PD1 with PD-L1.

[0509] In one embodiment, the agent comprises the extracellular domain (ECD) of an inhibitory molecule, e.g., Programmed Death 1 (PD1), fused to a transmembrane domain and intracellular signaling domains such as 41BB and CD3 zeta (also referred to herein as a PD1 CAR). In one embodiment, the PD1 CAR, when used in combinations with a XCAR described herein, improves the persistence of the T cell. In one embodiment, the CAR is a PD1 CAR comprising the extracellular domain of PD1 indicated as underlined in SEQ ID NO: 26. In one embodiment, the PD1 CAR comprises the amino acid sequence of SEQ ID NO:26. In one embodiment, the PD1 CAR comprises the amino acid sequence of SEQ ID NO:39).

[0510] In one embodiment, the agent comprises a nucleic acid sequence encoding the PD1 CAR, e.g., the PD1 CAR described herein. In one embodiment, the nucleic acid sequence for the PD1 CAR is shown as SEQ ID NO: 27 in Table 1, with the sequence for PD1 ECD underlined.

[0511] In another aspect, the present disclosure provides a population of CAR-expressing cells. In some embodiments, the population of CAR-expressing cells comprises a mixture of cells expressing different CARs. For example, in one embodiment, the population of CART cells can include a first cell expressing a CAR having an antigen binding domain to a antigen described herein, and a second cell expressing a CAR having a different antigen binding domain, e.g., an antigen binding domain to a different antigen described herein, e.g., an antigen binding domain to a tumor antigen described herein that differs from the tumor antigen bound by the antigen binding domain of the CAR expressed by the first cell. As another example, the population of CAR-expressing cells can include a first cell expressing a CAR that includes an antigen binding domain to a tumor antigen described herein, and a second cell expressing a CAR that includes an antigen binding domain to a target other than a tumor antigen as described herein. In one embodiment, the population of CAR-expressing cells includes, e.g., a first cell expressing a CAR that includes a primary intracellular signaling domain, and a second cell expressing a CAR that includes a secondary signaling domain.

[0512] In another aspect, the present disclosure provides a population of cells wherein at least one cell in the population expresses a CAR having an antigen binding domain to a tumor antigen described herein, and a second cell expressing another agent, e.g., an agent which enhances the activity of a CAR-expressing cell. For example, in one embodiment, the agent can be an agent which inhibits an inhibitory molecule. Inhibitory molecules, e.g., PD-1, can, in some embodiments, decrease the ability of a CAR-expressing cell to mount an immune effector response. Examples of inhibitory molecules include PD-1, PD-L1, CTLA4, TIM3, CEACAM (e.g., CEACAM-1, CEACAM-3 and/or CEACAM-5), LAG3, VISTA, BTLA, TIGIT, LAIR1, CD160, 2B4, CD80, CD86, B7-H3 (CD276), B7-H4 (VTCN1), HVEM (TNFRSF14 or CD270), KIR, A2aR, MHC class I, MHC class II, GAL9, adenosine, and TGFR beta. In one embodiment, the agent which inhibits an inhibitory molecule, e.g., is a molecule described herein, e.g., an agent that comprises a first polypeptide, e.g., an inhibitory molecule, associated with a second polypeptide that provides a positive signal to the cell, e.g., an intracellular signaling domain described herein. In one embodiment, the agent comprises a first polypeptide, e.g., of an inhibitory molecule such as PD-1, PD-L1, CTLA4, TIM3, CEACAM (e.g., CEACAM-1, CEACAM-3 and/or CEACAM-5), LAG3, VISTA, BTLA, TIGIT, LAIR1, CD160, 2B4, CD80, CD86,137-H3 (CD276), B7-H4 (VTCN1), HVEM (TNFRSF14 or CD270), KIR, A2aR, MHC class I, MHC class II, GAL9, adenosine, and TGFR beta, or a fragment of any of these, and a second polypeptide which is an intracellular signaling domain described herein (e.g., comprising a costimulatory domain (e.g., 41BB, CD27, OX40 or CD28, e.g., as described herein) and/or a primary signaling domain (e.g., a CD3 zeta signaling domain described herein). In one embodiment, the agent comprises a first polypeptide of PD-1 or a fragment thereof, and a second polypeptide of an intracellular signaling domain described herein (e.g., a CD28 signaling domain described herein and/or a CD3 zeta signaling domain described herein).

[0513] In one aspect, the present disclosure provides methods comprising administering a population of CAR-expressing cells, e.g., a mixture of cells expressing different CARs, in combination with another agent, e.g., a kinase inhibitor, such as a kinase inhibitor described herein. In another aspect, the present disclosure provides methods comprising administering a population of cells wherein at least one cell in the population expresses a CAR having an antigen binding domain of a tumor antigen described herein, and a second cell expressing another agent, e.g., an agent which enhances the activity of a CAR-expressing cell, in combination with another agent, e.g., a kinase inhibitor, such as a kinase inhibitor described herein.

[0514] Exemplary CAR Molecules

[0515] The CAR molecules disclosed herein can comprise a binding domain that binds to a target, e.g., a target as described herein; a transmembrane domain, e.g., a transmembrane domain as described herein; and an intracellular signaling domain, e.g., an intracellular domain as described herein. In embodiments, the binding domain comprises a heavy chain complementary determining region 1 (HC CDR1), a heavy chain complementary determining region 2 (HC CDR2), and a heavy chain complementary determining region 3 (HC CDR3) of a heavy chain binding domain described herein, and/or a light chain complementary determining region 1 (LC CDR1), a light chain complementary determining region 2 (LC CDR2), and a light chain complementary determining region 3 (LC CDR3) of a light chain binding domain described herein.

[0516] In other embodiments, the CAR molecule comprises a CD19 CAR molecule described herein, e.g., a CD19 CAR molecule described in US-2015-0283178-A1, e.g., CTL019. In embodiments, the CD19 CAR comprises an amino acid, or has a nucleotide sequence shown in US-2015-0283178-A1, incorporated herein by reference, or a sequence substantially identical thereto (e.g., at least 85%, 90%, 95% or more identical thereto).

[0517] In one embodiment, the CAR T cell that specifically binds to CD19 has the USAN designation TISAGENLECLEUCEL-T. CTL019 is made by a gene modification of T cells is mediated by stable insertion via transduction with a self-inactivating, replication deficient Lentiviral (LV) vector containing the CTL019 transgene under the control of the EF-1 alpha promoter. CTL019 can be a mixture of transgene positive and negative T cells that are delivered to the subject on the basis of percent transgene positive T cells.

[0518] In one embodiment, the CAR19 molecule comprises (e.g., consists of) an amino acid sequence as provided in Table 15A, or in Table 3 of International Publication No. WO2014/153270, filed Mar. 15, 2014; incorporated herein by reference. The amino acid and nucleotide sequences encoding the CD19 CAR molecules and antigen binding domains (e.g., including one, two, three VH CDRs; and one, two, three VL CDRs according to Kabat or Chothia), are specified in WO2014/153270. In embodiments, the CD19 CAR comprises an amino acid, or has a nucleotide sequence shown in WO2014/153270 incorporated herein by reference, or a sequence substantially identical to any of the aforesaid sequences (e.g., at least 85%, 90%, 95% or more identical to any of the aforesaid CD19 CAR sequences). In one embodiment, the CAR molecule comprises (e.g., consists of) an amino acid sequence selected from any one of SEQ ID NOs: 897, 902, 907, 912, 917, 922, 927, 932, 937, 942, 947, 952, 956; or an amino acid sequence having at least one, two, three, four, five, 10, 15, 20 or 30 modifications (e.g., substitutions, e.g., conservative substitutions) but not more than 60, 50, or 40 modifications (e.g., substitutions, e.g., conservative substitutions) of an amino acid sequence selected from any one of SEQ ID NOs: 897, 902, 907, 912, 917, 922, 927, 932, 937, 942, 947, 952, 956; or an amino acid sequence having 85%, 90%, 95%, 96%, 97%, 98%, 99% identity to an amino acid sequence selected from any one of SEQ ID NOs: 897, 902, 907, 912, 917, 922, 927, 932, 937, 942, 947, 952, 956.

[0519] In one embodiment, the parental murine scFv sequence is the CAR19 construct provided in PCT publication WO2012/079000 (incorporated herein by reference) and provided herein in Table 15A. In one embodiment, the anti-CD19 binding domain is a scFv described in WO2012/079000 and provided herein in Table 15A.

[0520] In one embodiment, the CD19 CAR comprises an amino acid sequence provided as SEQ ID NO: 12 in PCT publication WO2012/079000. In embodiment, the amino acid sequence is:

[0521] MALPVTALLLPLALLLHAARPdiqmtqttsslsaslgdrvtiscrasqdiskylnwyqqkpdgtvklliyhtsrlhsgvpsrfsgsgsgtdyslti snleqediatyfcqqgntlpytfgggtkleitggggsggggsggggsevklqesgpglvapsqslsvtctvsgvslpdygvswirqpprkglewlgvi wgsettyynsalksrltiikdnsksqvflkmnslqtddtaiyycakhyyyggsyamdywgqgtsvtvsstttpaprpptpaptiasqplslrpeacrpa aggayhtrgldfacdiyiwaplagtcgvlllslvitlyckrgrkkllyifkgpfmrpvqttgeedgcscrfpeeeeggcelrykfsrsadapaykqgqngly nelnlgrreeydvldkrrgrdpemggkprrknpqeglynelqkdkmaeayseigmkgerrrgkghdglygglstatkdtydalhmgalppr (SEQ ID NO: 891), or a sequence substantially identical thereto (e.g., at least 85%, 90% or 95% or higher identical thereto), with or without the signal peptide sequence indicated in capital letters.

[0522] In embodiment, the amino acid sequence is:

[0523] digmtqttsslsaslgdrytiscrasqdiskylnwyqqkpdgtvklliyhtsrlhsgvpsrfsgsgsgtdysltisnleqediatyfcqqgntlpytfgggtkle itggggsggggsggggsevklqesgpglvapsgslsvtctvsgyslpdygyswirqpprkglewlgviwgsettyynsalksrltiikdnsksqvflkm nslqtddtaiyycakhyyyggsyamdywgqgtsvtvsstttpaprpptpaptiasqplslrpeacrpaaggavhtrgldfacdiyiwaplagtcgyllls Ivitlyckrgrkkllyifkgpfmrpvqttgeedgcscrfpeeeeggcelrykfsrsadapaykqgqnglynelnlgrreeydvldkrrgrdpemggkprrk npqeglynelqkdkmaeayseigmkgerrrgkghdglygglstatkdtydalhmgalppr (SEQ ID NO: 892), or a sequence substantially homologous thereto (e.g., at least 85%, 90% or 95% or higher identical thereto).

[0524] In embodiments, the CAR molecule is a CD19 CAR molecule described herein, e.g., a humanized CAR molecule described herein, e.g., a humanized CD19 CAR molecule of Table 15A or having CDRs as set out in Tables 15B and 15C.

[0525] In embodiments, the CAR molecule is a CD19 CAR molecule described herein, e.g., a murine CAR molecule described herein, e.g., a murine CD19 CAR molecule of Table 15A or having CDRs as set out in Tables 15B and 15C.

[0526] In some embodiments, the CAR molecule comprises one, two, and/or three CDRs from the heavy chain variable region and/or one, two, and/or three CDRs from the light chain variable region of the murine or humanized CD19 CAR of Tables 15B and 15C.

[0527] In one embodiment, the antigen binding domain comprises one, two three (e.g., all three) heavy chain CDRs, HC CDR1, HC CDR2 and HC CDR3, from an antibody listed herein, and/or one, two, three (e.g., all three) light chain CDRs, LC CDR1, LC CDR2 and LC CDR3, from an antibody listed herein. In one embodiment, the antigen binding domain comprises a heavy chain variable region and/or a variable light chain region of an antibody listed or described herein.

[0528] Exemplary CD19 CARs include any of the CD19 CARs or anti-CD19 binding domains described herein, e.g., in one or more tables (e.g., Table 15A) described herein (e.g., or an anti-CD19 CAR described in Xu et al. Blood 123.24 (2014):3750-9; Kochenderfer et al. Blood 122.25 (2013):4129-39, Cruz et al. Blood 122.17 (2013):2965-73, NCT00586391, NCT01087294, NCT02456350, NCT00840853, NCT02659943, NCT02650999, NCT02640209, NCT01747486, NCT02546739, NCT02656147, NCT02772198, NCT00709033, NCT02081937, NCT00924326, NCT02735083, NCT02794246, NCT02746952, NCT01593696, NCT02134262, NCT01853631, NCT02443831, NCT02277522, NCT02348216, NCT02614066, NCT02030834, NCT02624258, NCT02625480, NCT02030847, NCT02644655, NCT02349698, NCT02813837, NCT02050347, NCT01683279, NCT02529813, NCT02537977, NCT02799550, NCT02672501, NCT02819583, NCT02028455, NCT01840566, NCT01318317, NCT01864889, NCT02706405, NCT01475058, NCT01430390, NCT02146924, NCT02051257, NCT02431988, NCT01815749, NCT02153580, NCT01865617, NCT02208362, NCT02685670, NCT02535364, NCT02631044, NCT02728882, NCT02735291, NCT01860937, NCT02822326, NCT02737085, NCT02465983, NCT02132624, NCT02782351, NCT01493453, NCT02652910, NCT02247609, NCT01029366, NCT01626495, NCT02721407, NCT01044069, NCT00422383, NCT01680991, NCT02794961, or NCT02456207, each of which is incorporated herein by reference in its entirety.

[0529] Exemplary CD19 CAR and antigen binding domain constructs that can be used in the methods described herein are shown in Table 15A. The light and heavy chain CDR sequences according to Kabat are shown by the bold and underlined text, and are also summarized in Tables 15A-C. The location of the signal sequence and histidine tag are also underlined. In embodiments, the CD19 CAR sequences and antigen binding fragments thereof do not include the signal sequence and/or histidine tag sequences.

[0530] In embodiments, the CD19 CAR comprises an anti-CD19 binding domain (e.g., murine or humanized anti-CD19 binding domain), a transmembrane domain, and an intracellular signaling domain, and wherein said anti-CD19 binding domain comprises a heavy chain complementary determining region 1 (HC CDR1), a heavy chain complementary determining region 2 (HC CDR2), and a heavy chain complementary determining region 3 (HC CDR3) of any anti-CD19 heavy chain binding domain amino acid sequences listed in Table 15A-C, or a sequence at least 85%, 90%, 95% or more identical thereto (e.g., having less than 5, 4, 3, 2 or 1 amino acid substitutions, e.g., conservative substitutions).

[0531] In one embodiment, the anti-CD19 binding domain comprises a light chain variable region described herein (e.g., in Table 15A) and/or a heavy chain variable region described herein (e.g., in Table 15A), or a sequence at least 85%, 90%, 95% or more identical thereto.

[0532] In one embodiment, the encoded anti-CD19 binding domain is a scFv comprising a light chain and a heavy chain of an amino acid sequence of Tables 5, or a sequence at least 85%, 90%, 95% or more identical thereto.

[0533] In an embodiment, the human or humanized anti-CD19 binding domain (e.g., an scFv) comprises: a light chain variable region comprising an amino acid sequence having at least one, two or three modifications (e.g., substitutions, e.g., conservative substitutions) but not more than 30, 20 or 10 modifications (e.g., substitutions, e.g., conservative substitutions) of an amino acid sequence of a light chain variable region provided in Table 15A, or a sequence at least 85%, 90%, 95% or more identical thereto; and/or a heavy chain variable region comprising an amino acid sequence having at least one, two or three modifications (e.g., substitutions, e.g., conservative substitutions) but not more than 30, 20 or 10 modifications (e.g., substitutions, e.g., conservative substitutions) of an amino acid sequence of a heavy chain variable region provided in Table 15A, or a sequence at least 85%, 90%, 95% or more identical thereto.

[0534] In one embodiment, the CAR molecule comprises a CD19 antigen binding domain (e.g., a murine, human or humanized antibody or antibody fragment that specifically binds to CD19), a transmembrane domain, and an intracellular signaling domain (e.g., an intracellular signaling domain comprising a costimulatory domain and/or a primary signaling domain).

[0535] Exemplary CAR19 molecules are provided in Table 15A (and also Table 7). The CAR molecules in Table 15A comprise a CD19 antigen binding domain, e.g., an amino acid sequence of any CD19 antigen binding domain provided in Table 7 or 10.

TABLE 15A
Exemplary CD19 CAR molecules

| | | |
|---|---|---|
| Name | SEQ ID NO: | Sequence |

CAR1

| | | |
|---|---|---|
| CAR1 scFv | 893 | EIVMTQSPATLSLSPGERATLSCRASQDISKYLNWYQQKPGQAPRLLIYH |
| domain | | TSRLHSGIPARFSGSGSGTDYTLTISSLQPEDFAVYFCQQGNTLPYTFGQ |
| | | GTKLEIKGGGGSGGGGSGGGGSQVQLQESGPGLVKPSETLSLTCTVSGVS |
| | | LPDYGVSWIRQPPGKGLEWIGVIWGSETTYYSSSLKSRVTISKDNSKNQV |
| | | SLKLSSVTAADTAVYYCAKHYYYGGSYAMDYWGQGTLVTVSS |
| 103101 | 894 | atggccctccctgtcaccgccctgctgcttccgctggctcttctgctccacgccg |
| CAR1 | | ctcggcccgaaattgtgatgacccagtcacccgccactcttagcctttcacccgg |
| Soluble scFv-nt | | tgagcgcgcaaccctgtcttgcagagcctcccaagacatctcaaaataccttaat |
| | | tggtatcaacagaagcccggacaggctcctcgccttctgatctaccacaccagcc |
| | | ggctccattctggaatccctgccaggttcagcggtagcggatctgggaccgacta |
| | | caccctcactatcagctcactgcagccagaggacttcgctgtctatttctgtcag |
| | | caagggaacaccctgccctacacctttggacagggcaccaagctcgagattaaag |
| | | gtggaggtggcagcggaggaggtgggtccggcggtggaggaagccaggtccaact |
| | | ccaagaaagcggaccgggtcttgtgaagccatcagaaactctttcactgacttgt |
| | | actgtgagcggagtgtctctccccgattacggggtgtcttggatcagacagccac |
| | | cggggaagggtctggaatggattggagtgatttggggctctgagactacttacta |
| | | ctcttcatccctcaagtcacgcgtcaccatctcaaaggacaactctaagaatcag |
| | | gtgtcactgaaactgtcatctgtgaccgcagccgacaccgccgtgtactattgcg |
| | | ctaagcattactattatggcgggagctacgcaatggattactggggacagggtac |
| | | tctggtcaccgtgtccagccaccaccatcatcaccatcaccat |
| 103101 | 895 | MALPVTALLLPLALLLHAARPeivmtqspatlslspgeratlscrasqdiskyln |
| CAR1 | | wyqqkpgqaprlliyhtsrlhsgiparfsgsgsgtdytltisslqpedfavyfcq |
| Soluble scFv-aa | | qgntlpytfgqgtkleikggggsggggsggggsqvqlqesgpglvkpsetlsltc |
| | | tvsgvslpdygvswirqppgkglewigviwgsettyyssslksrvtiskdnsknq |
| | | vslklssvtaadtavyycakhyyyggsyamdywgqgtivtvsshhhhhhhh |
| 104875 | 896 | atggccctccctgtcaccgccctgctgcttccgctggctcttctgctccacgccg |
| CAR1-Full-nt | | ctcggcccgaaattgtgatgacccagtcacccgccactcttagcctttcacccgg |
| | | tgagcgcgcaaccctgtcttgcagagcctcccaagacatctcaaaataccttaat |
| | | tggtatcaacagaagcccggacaggctcctcgccttctgatctaccacaccagcc |
| | | ggctccattctggaatccctgccaggttcagcggtagcggatctgggaccgacta |
| | | caccctcactatcagctcactgcagccagaggacttcgctgtctatttctgtcag |
| | | caagggaacaccctgccctacacctttggacagggcaccaagctcgagattaaag |
| | | gtggaggtggcagcggaggaggtgggtccggcggtggaggaagccaggtccaact |
| | | ccaagaaagcggaccgggtcttgtgaagccatcagaaactctttcactgacttgt |
| | | actgtgagcggagtgtctctccccgattacggggtgtcttggatcagacagccac |
| | | cggggaagggtctggaatggattggagtgatttggggctctgagactacttacta |
| | | ctcttcatccctcaagtcacgcgtcaccatctcaaaggacaactctaagaatcag |
| | | gtgtcactgaaactgtcatctgtgaccgcagccgacaccgccgtgtactattgcg |
| | | ctaagcattactattatggcgggagctacgcaatggattactggggacagggtac |
| | | tctggtcaccgtgtccagcaccactaccccagcaccgaggccacccaccccggct |
| | | cctaccatcgcctcccagcctctgtccctgcgtccggaggcatgtagacccgcag |
| | | ctggtggggccgtgcatacccggggtcttgacttcgcctgcgatatctacatttg |
| | | ggcccctctggctggtacttgcggggtcctgctgctttcactcgtgatcactctt |
| | | tactgtaagcgcggtcggaagaagctgctgtacatctttaagcaacccttcatga |
| | | ggcctgtgcagactactcaagaggaggacggctgttcatgccggttcccagagga |
| | | ggaggaaggcggctgcgaactgcgcgtgaaattcagccgcagcgcagatgctcca |
| | | gcctacaagcaggggcagaaccagctctacaacgaactcaatcttggtcggagag |
| | | aggagtacgacgtgctggacaagcggagaggacgggacccagaaatgggcgggaa |
| | | gccgcgcagaaagaatccccaagagggcctgtacaacgagctccaaaaggataag |
| | | atggcagaagcctatagcgagattggtatgaaaggggaacgcagaagaggcaaag |
| | | gccacgacggactgtaccagggactcagcaccgccaccaaggacacctatgacgc |
| | | tcttcacatgcaggccctgccgcctcgg |
| 104875 | 897 | MALPVTALLLPLALLLHAARPeivmtqspatlslspgeratlscrasqdiskyln |
| CAR1-Full-aa | | wyqqkpgqaprlliyhtsrlhsgiparfsgsgsgtdytltisslqpedfavyfcq |
| | | qgntlpytfgqgtkleikggggsggggsggggsqvqlqesgpglvkpsetlsltc |
| | | tvsgvslpdygvswirqppgkglewigviwgsettyyssslksrvtiskdnsknq |
| | | vslklssvtaadtavyycakhyyyggsyamdywgqgtivtvsstttpaprpptpa |
| | | ptiasqplslrpeacrpaaggavhtrgldfacdiyiwaplagtogvlllslvitl |
| | | yckrgrkkllyifkqpfmrpvqttgeedgcscrfpeeeeggcelrvkfsrsadap |
| | | aykqgqnqlynelnlgrreeydvldkrrgrdpemggkprrknpqeglynelqkdk |
| | | [sequence omitted] |

CAR2

| | | |
|---|---|---|
| CAR2 scFv | 898 | eivmtqspatlslspgeratlscrasqdiskylnwyqqkpgqaprlliyhtsrlh |
| domain | | sgiparfsgsgsgtdytltisslqpedfavyfcqqgntlpytfgqgtkleikggg |
| | | gsggggsggggsqvqlqesgpglvkpsetlsltctvsgvslpdygvswirqppgk |
| | | glewigviwgsettyyqsslksrvtiskdnsknqvslklssvtaadtavyycakh |
| | | yyyggsyamdywgqgtivtvss |
| 103102 | 899 | atggccctccctgtcaccgccctgctgcttccgctggctcttctgctccacgccg |
| CAR2- | | ctcggcccgaaattgtgatgacccagtcacccgccactcttagcctttcacccgg |
| Soluble scFv-nt | | tgagcgcgcaaccctgtcttgcagagcctcccaagacatctcaaaataccttaat |
| | | tggtatcaacagaagcccggacaggctcctcgccttctgatctaccacaccagcc |
| | | ggctccattctggaatccctgccaggttcagcggtagcggatctgggaccgacta |
| | | caccctcactatcagctcactgcagccagaggacttcgctgtctatttctgtcag |
| | | caagggaacaccctgccctacacctttggacagggcaccaagctcgagattaaag |
| | | gtggaggtggcagcggaggaggtgggtccggcggtggaggaagccaggtccaact |
| | | ccaagaaagcggaccgggtcttgtgaagccatcagaaactctttcactgacttgt |
| | | actgtgagcggagtgtctctccccgattacggggtgtcttggatcagacagccac |
| | | cggggaagggtctggaatggattggagtgatttggggctctgagactacttacta |
| | | ccaatcatccctcaagtcacgcgtcaccatctcaaaggacaactctaagaatcag |
| | | gtgtcactgaaactgtcatctgtgaccgcagccgacaccgccgtgtactattgcg |
| | | ctaagcattactattatggcgggagctacgcaatggattactggggacagggtac |
| | | tctggtcaccgtgtccagccaccaccatcatcaccatcaccat |
| 103102 | 900 | MALPVTALLLPLALLLHAARPeivmtqspatlslspgeratlscrasqdiskyln |
| CAR2- | | wyqqkpgqaprlliyhtsrlhsgiparfsgsgsgtdytltisslqpedfavyfcq |
| Soluble scFv-aa | | qgntlpytfgqgtkleikggggsggggsggggsqvqlqesgpglvkpsetlsltc |
| | | tvsgvslpdygvswirqppgkglewigviwgsettyyqsslksrvtiskdnsknq |
| | | vslklssvtaadtavyycakhyyyggsyamdywgqgtivtvsshhhhhhhh |
| 104876 | 901 | atggccctccctgtcaccgccctgctgcttccgctggctcttctgctccacgccg |
| CAR2-Full-nt | | ctcggcccgaaattgtgatgacccagtcacccgccactcttagcctttcacccgg |
| | | tgagcgcgcaaccctgtcttgcagagcctcccaagacatctcaaaataccttaat |
| | | tggtatcaacagaagcccggacaggctcctcgccttctgatctaccacaccagcc |
| | | ggctccattctggaatccctgccaggttcagcggtagcggatctgggaccgacta |
| | | caccctcactatcagctcactgcagccagaggacttcgctgtctatttctgtcag |
| | | caagggaacaccctgccctacacctttggacagggcaccaagctcgagattaaag |
| | | gtggaggtggcagcggaggaggtgggtccggcggtggaggaagccaggtccaact |
| | | ccaagaaagcggaccgggtcttgtgaagccatcagaaactctttcactgacttgt |
| | | actgtgagcggagtgtctctccccgattacggggtgtcttggatcagacagccac |
| | | cggggaagggtctggaatggattggagtgatttggggctctgagactacttacta |
| | | ccaatcatccctcaagtcacgcgtcaccatctcaaaggacaactctaagaatcag |
| | | gtgtcactgaaactgtcatctgtgaccgcagccgacaccgccgtgtactattgcg |
| | | ctaagcattactattatggcgggagctacgcaatggattactggggacagggtac |
| | | tctggtcaccgtgtccagcaccactaccccagcaccgaggccacccaccccggct |
| | | cctaccatcgcctcccagcctctgtccctgcgtccggaggcatgtagacccgcag |
| | | ctggtggggccgtgcatacccggggtcttgacttcgcctgcgatatctacatttg |
| | | ggcccctctggctggtacttgcggggtcctgctgctttcactcgtgatcactctt |
| | | tactgtaagcgcggtcggaagaagctgctgtacatctttaagcaacccttcatga |
| | | ggcctgtgcagactactcaagaggaggacggctgttcatgccggttcccagagga |
| | | ggaggaaggcggctgcgaactgcgcgtgaaattcagccgcagcgcagatgctcca |
| | | gcctacaagcaggggcagaaccagctctacaacgaactcaatcttggtcggagag |
| | | aggagtacgacgtgctggacaagcggagaggacgggacccagaaatgggcgggaa |
| | | gccgcgcagaaagaatccccaagagggcctgtacaacgagctccaaaaggataag |
| | | atggcagaagcctatagcgagattggtatgaaaggggaacgcagaagaggcaaag |
| | | gccacgacggactgtaccagggactcagcaccgccaccaaggacacctatgacgc |
| | | tcttcacatgcaggccctgccgcctcgg |
| 104876 | 902 | MALPVTALLLPLALLLHAARPeivmtqspatlslspgeratlscrasqdiskyln |
| CAR2-Full-aa | | wyqqkpgqaprlliyhtsrlhsgiparfsgsgsgtdytltisslqpedfavyfcq |
| | | qgntlpytfgqgtkleikggggsggggsggggsqvqlqesgpglvkpsetlsltc |
| | | tvsgvslpdygvswirqppgkglewigviwgsettyyqsslksrvtiskdnsknq |
| | | vslklssvtaadtavyycakhyyyggsyamdywgqgtivtvsstttpaprpptpa |
| | | ptiasqplslrpeacrpaaggavhtrgldfacdiyiwaplagtogvlllslvitl |
| | | yckrgrkkllyifkqpfmrpvqttgeedgcscrfpeeeeggcelrvkfsrsadap |
| | | aykqgqnqlynelnlgrreeydvldkrrgrdpemggkprrknpqeglynelqkdk |
| | | [sequence omitted] |

CAR3

| | | |
|---|---|---|
| CAR3 scFv | 903 | qvqlqesgpglvkpsetlsltctvsgvslpdygvswirqppgkglewigviwgse |
| domain | | ttyyssslksrvtiskdnsknqvslklssvtaadtavyycakhyyyggsyamdyw |
| | | gqgtivtvssggggsggggsggggseivmtqspatlslspgeratlscrasqdis |
| | | kylnwyqqkpgqaprlliyhtsrlhsgiparfsgsgsgtdytltisslqpedfav |
| | | yfcqqgntlpytfgqgtkleik |
| 103104 | 904 | atggctctgcccgtgaccgcactcctcctgccactggctctgctgcttcacgccg |
| CAR3- | | ctcgcccacaagtccagcttcaagaatcagggcctggtctggtgaagccatctga |
| Soluble scFv-nt | | gactctgtccctcacttgcaccgtgagcggagtgtccctcccagactacggagtg |
| | | agctggattagacagcctcccggaaagggactggagtggatcggagtgatttggg |
| | | gtagcgaaaccacttactattcatcttccctgaagtcacgggtcaccatttcaaa |
| | | ggataactcaaagaatcaagtgagcctcaagctctcatcagtcaccgccgctgac |
| | | accgccgtgtattactgtgccaagcattactactatggagggtcctacgccatgg |
| | | actactggggccagggaactctggtcactgtgtcatctggtggaggaggtagcgg |
| | | aggaggcgggagcggtggaggtggctccgaaatcgtgatgacccagagccctgca |
| | | accctgtccctttctcccggggaacgggctaccctttcttgtcgggcatcacaag |
| | | atatctcaaaatacctcaattggtatcaacagaagccgggacaggcccctaggct |
| | | tcttatctaccacacctctcgcctgcatagcgggattcccgcacgctttagcggg |
| | | tctggaagcgggaccgactacactctgaccatctcatctctccagcccgaggact |
| | | tcgccgtctacttctgccagcagggtaacaccctgccgtacaccttcggccaggg |
| | | caccaagcttgagatcaaacatcaccaccatcatcaccatcac |
| 103104 | 905 | MALPVTALLLPLALLLHAARPqvqlqesgpglvkpsetlsltctvsgvslpdygv |
| CAR3- | | swirqppgkglewigviwgsettyyssslksrvtiskdnsknqvslklssvtaad |
| Soluble scFv-aa | | tavyycakhyyyggsyamdywgqgtivtvssggggsggggsggggseivmtqspa |
| | | tlslspgeratlscrasqdiskylnwyqqkpgqaprlliyhtsrlhsgiparfsg |
| | | sgsgtdytltisslqpedfavyfcqqgntlpytfgqgtkleikhhhhhhhh |
| 104877 | 906 | atggctctgcccgtgaccgcactcctcctgccactggctctgctgcttcacgccg |
| CAR3-Full-nt | | ctcgcccacaagtccagcttcaagaatcagggcctggtctggtgaagccatctga |
| | | gactctgtccctcacttgcaccgtgagcggagtgtccctcccagactacggagtg |
| | | agctggattagacagcctcccggaaagggactggagtggatcggagtgatttggg |
| | | gtagcgaaaccacttactattcatcttccctgaagtcacgggtcaccatttcaaa |
| | | ggataactcaaagaatcaagtgagcctcaagctctcatcagtcaccgccgctgac |
| | | accgccgtgtattactgtgccaagcattactactatggagggtcctacgccatgg |
| | | actactggggccagggaactctggtcactgtgtcatctggtggaggaggtagcgg |
| | | aggaggcgggagcggtggaggtggctccgaaatcgtgatgacccagagccctgca |
| | | accctgtccctttctcccggggaacgggctaccctttcttgtcgggcatcacaag |
| | | atatctcaaaatacctcaattggtatcaacagaagccgggacaggcccctaggct |
| | | tcttatctaccacacctctcgcctgcatagcgggattcccgcacgctttagcggg |
| | | tctggaagcgggaccgactacactctgaccatctcatctctccagcccgaggact |
| | | tcgccgtctacttctgccagcagggtaacaccctgccgtacaccttcggccaggg |
| | | caccaagcttgagatcaaaaccactactcccgctccaaggccacccacccctgcc |
| | | ccgaccatcgcctctcagccgctttccctgcgtccggaggcatgtagacccgcag |
| | | ctggtggggccgtgcatacccggggtcttgacttcgcctgcgatatctacatttg |
| | | ggcccctctggctggtacttgcggggtcctgctgctttcactcgtgatcactctt |
| | | tactgtaagcgcggtcggaagaagctgctgtacatctttaagcaacccttcatga |
| | | ggcctgtgcagactactcaagaggaggacggctgttcatgccggttcccagagga |
| | | ggaggaaggcggctgcgaactgcgcgtgaaattcagccgcagcgcagatgctcca |
| | | gcctacaagcaggggcagaaccagctctacaacgaactcaatcttggtcggagag |
| | | aggagtacgacgtgctggacaagcggagaggacgggacccagaaatgggcgggaa |
| | | gccgcgcagaaagaatccccaagagggcctgtacaacgagctccaaaaggataag |
| | | atggcagaagcctatagcgagattggtatgaaaggggaacgcagaagaggcaaag |
| | | gccacgacggactgtaccagggactcagcaccgccaccaaggacacctatgacgc |
| | | tcttcacatgcaggccctgccgcctcgg |
| 104877 | 907 | MALPVTALLLPLALLLHAARPqvqlqesgpglvkpsetlsltctvsgvslpdygv |
| CAR3-Full-aa | | swirqppgkglewigviwgsettyyssslksrvtiskdnsknqvslklssvtaad |
| | | tavyycakhyyyggsyamdywgqgtivtvssggggsggggsggggseivmtqspa |
| | | tlslspgeratlscrasqdiskylnwyqqkpgqaprlliyhtsrlhsgiparfsg |
| | | sgsgtdytltisslqpedfavyfcqqgntlpytfgqgtkleiktttpaprpptpa |
| | | ptiasqplslrpeacrpaaggavhtrgldfacdiyiwaplagtogvlllslvitl |
| | | yckrgrkkllyifkqpfmrpvqttgeedgcscrfpeeeeggcelrvkfsrsadap |
| | | aykqgqnqlynelnlgrreeydvldkrrgrdpemggkprrknpqeglynelqkdk |
| | | [sequence omitted] |

CAR4

| | | |
|---|---|---|
| CAR4 scFv | 908 | qvqlqesgpglvkpsetlsltctvsgvslpdygvswirqppgkglewigviwgse |
| domain | | ttyyqsslksrvtiskdnsknqvslklssvtaadtavyycakhyyyggsyamdyw |
| | | gqgtivtvssggggsggggsggggseivmtqspatlslspgeratlscrasqdis |
| | | kylnwyqqkpgqaprlliyhtsrlhsgiparfsgsgsgtdytltisslqpedfav |
| | | yfcqqgntlpytfgqgtkleik |
| 103106 | 909 | atggctctgcccgtgaccgcactcctcctgccactggctctgctgcttcacgccg |
| CAR4- | | ctcgcccacaagtccagcttcaagaatcagggcctggtctggtgaagccatctga |
| Soluble scFv-nt | | gactctgtccctcacttgcaccgtgagcggagtgtccctcccagactacggagtg |
| | | agctggattagacagcctcccggaaagggactggagtggatcggagtgatttggg |
| | | gtagcgaaaccacttactatcaatcttccctgaagtcacgggtcaccatttcaaa |
| | | ggataactcaaagaatcaagtgagcctcaagctctcatcagtcaccgccgctgac |
| | | accgccgtgtattactgtgccaagcattactactatggagggtcctacgccatgg |
| | | actactggggccagggaactctggtcactgtgtcatctggtggaggaggtagcgg |
| | | aggaggcgggagcggtggaggtggctccgaaatcgtgatgacccagagccctgca |
| | | accctgtccctttctcccggggaacgggctaccctttcttgtcgggcatcacaag |
| | | atatctcaaaatacctcaattggtatcaacagaagccgggacaggcccctaggct |
| | | tcttatctaccacacctctcgcctgcatagcgggattcccgcacgctttagcggg |
| | | tctggaagcgggaccgactacactctgaccatctcatctctccagcccgaggact |
| | | tcgccgtctacttctgccagcagggtaacaccctgccgtacaccttcggccaggg |
| | | caccaagcttgagatcaaacatcaccaccatcatcaccatcac |
| 103106 | 910 | MALPVTALLLPLALLLHAARPqvqlqesgpglvkpsetlsltctvsgvslpdygv |
| CAR4- | | swirqppgkglewigviwgsettyyqsslksrvtiskdnsknqvslklssvtaad |
| Soluble scFv-aa | | tavyycakhyyyggsyamdywgqgtivtvssggggsggggsggggseivmtqspa |
| | | tlslspgeratlscrasqdiskylnwyqqkpgqaprlliyhtsrlhsgiparfsg |
| | | sgsgtdytltisslqpedfavyfcqqgntlpytfgqgtkleikhhhhhhhh |
| 104878 | 911 | atggctctgcccgtgaccgcactcctcctgccactggctctgctgcttcacgccg |
| CAR4-Full-nt | | ctcgcccacaagtccagcttcaagaatcagggcctggtctggtgaagccatctga |
| | | gactctgtccctcacttgcaccgtgagcggagtgtccctcccagactacggagtg |
| | | agctggattagacagcctcccggaaagggactggagtggatcggagtgatttggg |
| | | gtagcgaaaccacttactatcaatcttccctgaagtcacgggtcaccatttcaaa |
| | | ggataactcaaagaatcaagtgagcctcaagctctcatcagtcaccgccgctgac |
| | | accgccgtgtattactgtgccaagcattactactatggagggtcctacgccatgg |
| | | actactggggccagggaactctggtcactgtgtcatctggtggaggaggtagcgg |
| | | aggaggcgggagcggtggaggtggctccgaaatcgtgatgacccagagccctgca |
| | | accctgtccctttctcccggggaacgggctaccctttcttgtcgggcatcacaag |
| | | atatctcaaaatacctcaattggtatcaacagaagccgggacaggcccctaggct |
| | | tcttatctaccacacctctcgcctgcatagcgggattcccgcacgctttagcggg |
| | | tctggaagcgggaccgactacactctgaccatctcatctctccagcccgaggact |
| | | tcgccgtctacttctgccagcagggtaacaccctgccgtacaccttcggccaggg |
| | | caccaagcttgagatcaaaaccactactcccgctccaaggccacccacccctgcc |
| | | ccgaccatcgcctctcagccgctttccctgcgtccggaggcatgtagacccgcag |
| | | ctggtggggccgtgcatacccggggtcttgacttcgcctgcgatatctacatttg |
| | | ggcccctctggctggtacttgcggggtcctgctgctttcactcgtgatcactctt |
| | | tactgtaagcgcggtcggaagaagctgctgtacatctttaagcaacccttcatga |
| | | ggcctgtgcagactactcaagaggaggacggctgttcatgccggttcccagagga |
| | | ggaggaaggcggctgcgaactgcgcgtgaaattcagccgcagcgcagatgctcca |
| | | gcctacaagcaggggcagaaccagctctacaacgaactcaatcttggtcggagag |
| | | aggagtacgacgtgctggacaagcggagaggacgggacccagaaatgggcgggaa |
| | | gccgcgcagaaagaatccccaagagggcctgtacaacgagctccaaaaggataag |
| | | atggcagaagcctatagcgagattggtatgaaaggggaacgcagaagaggcaaag |
| | | gccacgacggactgtaccagggactcagcaccgccaccaaggacacctatgacgc |
| | | tcttcacatgcaggccctgccgcctcgg |
| 104878 | 912 | MALPVTALLLPLALLLHAARPqvqlqesgpglvkpsetlsltctvsgvslpdygv |
| CAR4-Full-aa | | swirqppgkglewigviwgsettyyqsslksrvtiskdnsknqvslklssvtaad |
| | | tavyycakhyyyggsyamdywgqgtivtvssggggsggggsggggseivmtqspa |
| | | tlslspgeratlscrasqdiskylnwyqqkpgqaprlliyhtsrlhsgiparfsg |
| | | sgsgtdytltisslqpedfavyfcqqgntlpytfgqgtkleiktttpaprpptpa |
| | | ptiasqplslrpeacrpaaggavhtrgldfacdiyiwaplagtogvlllslvitl |
| | | yckrgrkkllyifkqpfmrpvqttgeedgcscrfpeeeeggcelrvkfsrsadap |
| | | aykqgqnqlynelnlgrreeydvldkrrgrdpemggkprrknpqeglynelqkdk |
| | | [sequence omitted] |

CAR5

| | | |
|---|---|---|
| CAR5 scFv | 913 | eivmtqspatlslspgeratlscrasqdiskylnwyqqkpgqaprlliyhtsrlh |
| domain | | sgiparfsgsgsgtdytltisslqpedfavyfcqqgntlpytfgqgtkleikggg |
| | | gsggggsggggsggggsqvqlqesgpglvkpsetlsltctvsgvslpdygvswir |
| | | qppgkglewigviwgsettyyssslksrvtiskdnsknqvslklssvtaadtavy |
| | | ycakhyyyggsyamdywgqgtivtvss |
| 99789 | 914 | atggccctcccagtgaccgctctgctgctgcctctcgcacttcttctccatgccg |
| CAR5- | | ctcggcctgagatcgtcatgacccaaagccccgctaccctgtccctgtcacccgg |
| Soluble scFv-nt | | cgagagggcaaccctttcatgcagggccagccaggacatttctaagtacctcaac |
| | | tggtatcagcagaagccagggcaggctcctcgcctgctgatctaccacaccagcc |
| | | gcctccacagcggtatccccgccagattttccgggagcgggtctggaaccgacta |
| | | caccctcaccatctcttctctgcagcccgaggatttcgccgtctatttctgccag |
| | | caggggaatactctgccgtacaccttcggtcaaggtaccaagctggaaatcaagg |
| | | gaggcggaggatcaggcggtggcggaagcggaggaggtggctccggaggaggagg |
| | | ttcccaagtgcagcttcaagaatcaggacccggacttgtgaagccatcagaaacc |
| | | ctctccctgacttgtaccgtgtccggtgtgagcctccccgactacggagtctctt |
| | | ggattcgccagcctccggggaagggtcttgaatggattggggtgatttggggatc |
| | | agagactacttactactcttcatcacttaagtcacgggtcaccatcagcaaagat |
| | | aatagcaagaaccaagtgtcacttaagctgtcatctgtgaccgccgctgacaccg |
| | | ccgtgtactattgtgccaaacattactattacggagggtcttatgctatggacta |
| | | ctggggacaggggaccctggtgactgtctctagccatcaccatcaccaccatcat |
| | | cac |
| 99789 | 915 | MALPVTALLLPLALLLHAARPeivmtqspatlslspgeratlscrasqdiskyln |
| CAR5- | | wyqqkpgqaprlliyhtsrlhsgiparfsgsgsgtdytltisslqpedfavyfcq |
| Soluble scFv-aa | | qgntlpytfgqgtkleikggggsggggsggggsggggsqvqlqesgpglvkpset |
| | | lsltctvsgvslpdygvswirqppgkglewigviwgsettyyssslksrvtiskd |
| | | nsknqvslklssvtaadtavyycaknyyyggsyamdywgqgtivtvsshhhhhhh |
| | | h |
| 104879 | 916 | atggccctccctgtcaccgccctgctgcttccgctggctcttctgctccacgccg |
| CAR5-Full-nt | | ctcggcccgaaattgtgatgacccagtcacccgccactcttagcctttcacccgg |
| | | tgagcgcgcaaccctgtcttgcagagcctcccaagacatctcaaaataccttaat |
| | | tggtatcaacagaagcccggacaggctcctcgccttctgatctaccacaccagcc |
| | | ggctccattctggaatccctgccaggttcagcggtagcggatctgggaccgacta |
| | | caccctcactatcagctcactgcagccagaggacttcgctgtctatttctgtcag |
| | | caagggaacaccctgccctacacctttggacagggcaccaagctcgagattaaag |
| | | gtggaggtggcagcggaggaggtgggtccggcggtggaggaagcggcggaggcgg |
| | | gagccaggtccaactccaagaaagcggaccgggtcttgtgaagccatcagaaact |
| | | ctttcactgacttgtactgtgagcggagtgtctctccccgattacggggtgtctt |
| | | ggatcagacagccaccggggaagggtctggaatggattggagtgatttggggctc |
| | | tgagactacttactactcttcatccctcaagtcacgcgtcaccatctcaaaggac |
| | | aactctaagaatcaggtgtcactgaaactgtcatctgtgaccgcagccgacaccg |
| | | ccgtgtactattgcgctaagcattactattatggcgggagctacgcaatggatta |
| | | ctggggacagggtactctggtcaccgtgtccagcaccactaccccagcaccgagg |
| | | ccacccaccccggctcctaccatcgcctcccagcctctgtccctgcgtccggagg |
| | | catgtagacccgcagctggtggggccgtgcatacccggggtcttgacttcgcctg |
| | | cgatatctacatttgggcccctctggctggtacttgcggggtcctgctgctttca |
| | | ctcgtgatcactctttactgtaagcgcggtcggaagaagctgctgtacatcttta |
| | | agcaacccttcatgaggcctgtgcagactactcaagaggaggacggctgttcatg |
| | | ccggttcccagaggaggaggaaggcggctgcgaactgcgcgtgaaattcagccgc |
| | | agcgcagatgctccagcctacaagcaggggcagaaccagctctacaacgaactca |
| | | atcttggtcggagagaggagtacgacgtgctggacaagcggagaggacgggaccc |
| | | agaaatgggcgggaagccgcgcagaaagaatccccaagagggcctgtacaacgag |
| | | ctccaaaaggataagatggcagaagcctatagcgagattggtatgaaaggggaac |
| | | gcagaagaggcaaaggccacgacggactgtaccagggactcagcaccgccaccaa |
| | | ggacacctatgacgctcttcacatgcaggccctgccgcctcgg |
| 104879 | 917 | MALPVTALLLPLALLLHAARPeivmtqspatlslspgeratlscrasqdiskyln |
| CAR5-Full-aa | | wyqqkpgqaprlliyhtsrlhsgiparfsgsgsgtdytltisslqpedfavyfcq |
| | | qgntlpytfgqgtkleikggggsggggsggggsggggsqvqlqesgpglvkpset |
| | | lsltctvsgvslpdygvswirqppgkglewigviwgsettyyssslksrvtiskd |
| | | nsknqvslklssvtaadtavyycakhyyyggsyamdywgqgtivtvsstttpapr |
| | | pptpaptiasqplslrpeacrpaaggavhtrgldfacdiyiwaplagtogvills |
| | | lvitlyckrgrkkllyifkqpfmrpvqttgeedgcscrfpeeeeggcelrvkfsr |
| | | sadapaykqgqnqlynelnlgrreeydvldkrrgrdpemggkprrknpqeglyne |
| | | lqkdkmaeayseigmkgerrrgkghdglycolstatkdtydalhmqalppr |

CAR6

| | | |
|---|---|---|
| CAR6 | 918 | eivmtqspatlslspgeratlscrasqdiskylnwyqqkpgqaprlliyhtsrin |
| scFv domain | | sgiparfsgsgsgtdytltisslqpedfavyfcqqgntlpytfgqgtkleikggg |
| | | gsggggsggggsggggsqvqlqesgpglvkpsetlsltctvsgvslpdygvswir |
| | | qppgkglewigviwgsettyyqsslksrvtiskdnsknqvslklssvtaadtavy |
| | | ycakhyyyggsyamdywgqgtivtvss |
| 99790 | 919 | atggccctcccagtgaccgctctgctgctgcctctcgcacttcttctccatgccg |
| CAR6- | | ctcggcctgagatcgtcatgacccaaagccccgctaccctgtccctgtcacccgg |
| Soluble scFv-nt | | cgagagggcaaccctttcatgcagggccagccaggacatttctaagtacctcaac |
| | | tggtatcagcagaagccagggcaggctcctcgcctgctgatctaccacaccagcc |
| | | gcctccacagcggtatccccgccagattttccgggagcgggtctggaaccgacta |
| | | caccctcaccatctcttctctgcagcccgaggatttcgccgtctatttctgccag |
| | | caggggaatactctgccgtacaccttcggtcaaggtaccaagctggaaatcaagg |
| | | gaggcggaggatcaggcggtggcggaagcggaggaggtggctccggaggaggagg |
| | | ttcccaagtgcagcttcaagaatcaggacccggacttgtgaagccatcagaaacc |
| | | ctctccctgacttgtaccgtgtccggtgtgagcctccccgactacggagtctctt |
| | | ggattcgccagcctccggggaagggtcttgaatggattggggtgatttggggatc |
| | | agagactacttactaccagtcatcacttaagtcacgggtcaccatcagcaaagat |
| | | aatagcaagaaccaagtgtcacttaagctgtcatctgtgaccgccgctgacaccg |
| | | ccgtgtactattgtgccaaacattactattacggagggtcttatgctatggacta |
| | | ctggggacaggggaccctggtgactgtctctagccatcaccatcaccaccatcat |
| | | cac |
| 99790 | 920 | MALPVTALLLPLALLLHAARPeivmtqspatlslspgeratlscrasqdiskyln |
| CAR6- | | wyqqkpgqaprlliyhtsrlhsgiparfsgsgsgtdytltisslqpedfavyfcq |
| Soluble scFv-aa | | qgntlpytfgqgtkleikggggsggggsggggsggggsqvqlqesgpglvkpset |
| | | lsltctvsgvslpdygvswirqppgkglewigviwgsettyyqsslksrvtiskd |
| | | nsknqvslklssvtaadtavyycaknyyyggsyamdywgqgtivtvsshhhhhhh |
| | | h |
| 104880 | 921 | atggccctccctgtcaccgccctgctgcttccgctggctcttctgctccacgccg |
| CAR6- | | ctcggcccgaaattgtgatgacccagtcacccgccactcttagcctttcacccgg |
| Full-nt | | tgagcgcgcaaccctgtcttgcagagcctcccaagacatctcaaaataccttaat |
| | | tggtatcaacagaagcccggacaggctcctcgccttctgatctaccacaccagcc |
| | | ggctccattctggaatccctgccaggttcagcggtagcggatctgggaccgacta |
| | | caccctcactatcagctcactgcagccagaggacttcgctgtctatttctgtcag |
| | | caagggaacaccctgccctacacctttggacagggcaccaagctcgagattaaag |
| | | gtggaggtggcagcggaggaggtgggtccggcggtggaggaagcggaggcggagg |
| | | gagccaggtccaactccaagaaagcggaccgggtcttgtgaagccatcagaaact |
| | | ctttcactgacttgtactgtgagcggagtgtctctccccgattacggggtgtctt |
| | | ggatcagacagccaccggggaagggtctggaatggattggagtgatttggggctc |
| | | tgagactacttactaccaatcatccctcaagtcacgcgtcaccatctcaaaggac |
| | | aactctaagaatcaggtgtcactgaaactgtcatctgtgaccgcagccgacaccg |
| | | ccgtgtactattgcgctaagcattactattatggcgggagctacgcaatggatta |
| | | ctggggacagggtactctggtcaccgtgtccagcaccactaccccagcaccgagg |
| | | ccacccaccccggctcctaccatcgcctcccagcctctgtccctgcgtccggagg |
| | | catgtagacccgcagctggtggggccgtgcatacccggggtcttgacttcgcctg |
| | | cgatatctacatttgggcccctctggctggtacttgcggggtcctgctgctttca |
| | | ctcgtgatcactctttactgtaagcgcggtcggaagaagctgctgtacatcttta |
| | | agcaacccttcatgaggcctgtgcagactactcaagaggaggacggctgttcatg |
| | | ccggttcccagaggaggaggaaggcggctgcgaactgcgcgtgaaattcagccgc |
| | | agcgcagatgctccagcctacaagcaggggcagaaccagctctacaacgaactca |
| | | atcttggtcggagagaggagtacgacgtgctggacaagcggagaggacgggaccc |
| | | agaaatgggcgggaagccgcgcagaaagaatccccaagagggcctgtacaacgag |
| | | ctccaaaaggataagatggcagaagcctatagcgagattggtatgaaaggggaac |
| | | gcagaagaggcaaaggccacgacggactgtaccagggactcagcaccgccaccaa |
| | | ggacacctatgacgctcttcacatgcaggccctgccgcctcgg |
| 104880 | 922 | MALPVTALLLPLALLLHAARPeivmtqspatlslspgeratlscrasqdiskyln |
| CAR6- | | wyqqkpgqaprlliyhtsrlhsgiparfsgsgsgtdytltisslqpedfavyfcq |
| Full-aa | | qgntlpytfgqgtkleikggggsggggsggggsggggsqvqlqesgpglvkpset |
| | | lsltctvsgvslpdygvswirqppgkglewigviwgsettyyqsslksrvtiskd |
| | | nsknqvslklssvtaadtavyycakhyyyggsyamdywgqgtivtvsstttpapr |
| | | pptpaptiasqplslrpeacrpaaggavhtrgldfacdiyiwaplagtogvills |
| | | lvitlyckrgrkkllyifkqpfmrpvqttgeedgcscrfpeeeeggcelrvkfsr |
| | | sadapaykqgqnqlynelnlgrreeydvldkrrgrdpemggkprrknpqeglyne |
| | | lqkdkmaeayseigmkgerrrgkghdglycolstatkdtydalhmqalppr |

CAR7

| | | |
|---|---|---|
| CAR7 scFv | 923 | qvqlqesgpglvkpsetlsltctvsgvslpdygvswirqppgkglewigviwgse |
| domain | | ttyyssslksrvtiskdnsknqvslklssvtaadtavyycakhyyyggsyamdyw |
| | | gqgtivtvssggggsggggsggggsggggseivmtqspatlslspgeratlscra |
| | | sqdiskylnwyqqkpgqaprlliyhtsrlhsgiparfsgsgsgtdytltisslqp |
| | | edfavyfcqqgntlpytfgqgtkleik |
| 100796 | 924 | atggcactgcctgtcactgccctcctgctgcctctggccctccttctgcatgccg |
| CAR7- | | ccaggccccaagtccagctgcaagagtcaggacccggactggtgaagccgtctga |
| Soluble scFv-nt | | gactctctcactgacttgtaccgtcagcggcgtgtccctccccgactacggagtg |
| | | tcatggatccgccaacctcccgggaaagggcttgaatggattggtgtcatctggg |
| | | gttctgaaaccacctactactcatcttccctgaagtccagggtgaccatcagcaa |
| | | ggataattccaagaaccaggtcagccttaagctgtcatctgtgaccgctgctgac |
| | | accgccgtgtattactgcgccaagcactactattacggaggaagctacgctatgg |
| | | actattggggacagggcactctcgtgactgtgagcagcggcggtggagggtctgg |
| | | aggtggaggatccggtggtggtgggtcaggcggaggagggagcgagattgtgatg |
| | | actcagtcaccagccaccctttctctttcacccggcgagagagcaaccctgagct |
| | | gtagagccagccaggacatttctaagtacctcaactggtatcagcaaaaaccggg |
| | | gcaggcccctcgcctcctgatctaccatacctcacgccttcactctggtatcccc |
| | | gctcggtttagcggatcaggatctggtaccgactacactctgaccatttccagcc |
| | | tgcagccagaagatttcgcagtgtatttctgccagcagggcaatacccttcctta |
| | | caccttcggtcagggaaccaagctcgaaatcaagcaccatcaccatcatcaccac |
| | | cat |
| 100796 | 925 | MALPVTALLLPLALLLHAARPqvqlqesgpglvkpsetlsltctvsgvslpdygv |
| CAR7- | | swirqppgkglewigviwgsettyyssslksrvtiskdnsknqvslklssvtaad |
| Soluble scFv-aa | | tavyycakhyyyggsyamdywgqgtivtvssggggsggggsggggsggggseivm |
| | | tqspatlslspgeratlscrasqdiskylnwyqqkpgqaprlliyhtsrlhsgip |
| | | arfsgsgsgtdytltisslqpedfavyfcqqgntlpytfgqgtkleikhhhhhhh |
| | | h |
| 104881 | 926 | atggctctgcccgtgaccgcactcctcctgccactggctctgctgcttcacgccg |
| CAR7 | | ctcgcccacaagtccagcttcaagaatcagggcctggtctggtgaagccatctga |
| Full-nt | | gactctgtccctcacttgcaccgtgagcggagtgtccctcccagactacggagtg |
| | | agctggattagacagcctcccggaaagggactggagtggatcggagtgatttggg |
| | | gtagcgaaaccacttactattcatcttccctgaagtcacgggtcaccatttcaaa |
| | | ggataactcaaagaatcaagtgagcctcaagctctcatcagtcaccgccgctgac |
| | | accgccgtgtattactgtgccaagcattactactatggagggtcctacgccatgg |
| | | actactggggccagggaactctggtcactgtgtcatctggtggaggaggtagcgg |
| | | aggaggcgggagcggtggaggtggctccggaggtggcggaagcgaaatcgtgatg |
| | | acccagagccctgcaaccctgtccctttctcccggggaacgggctaccctttctt |
| | | gtcgggcatcacaagatatctcaaaatacctcaattggtatcaacagaagccggg |
| | | acaggcccctaggcttcttatctaccacacctctcgcctgcatagcgggattccc |
| | | gcacgctttagcgggtctggaagcgggaccgactacactctgaccatctcatctc |
| | | tccagcccgaggacttcgccgtctacttctgccagcagggtaacaccctgccgta |
| | | caccttcggccagggcaccaagcttgagatcaaaaccactactcccgctccaagg |
| | | ccacccacccctgccccgaccatcgcctctcagccgctttccctgcgtccggagg |
| | | catgtagacccgcagctggtggggccgtgcatacccggggtcttgacttcgcctg |
| | | cgatatctacatttgggcccctctggctggtacttgcggggtcctgctgctttca |
| | | ctcgtgatcactctttactgtaagcgcggtcggaagaagctgctgtacatcttta |
| | | agcaacccttcatgaggcctgtgcagactactcaagaggaggacggctgttcatg |
| | | ccggttcccagaggaggaggaaggcggctgcgaactgcgcgtgaaattcagccgc |
| | | agcgcagatgctccagcctacaagcaggggcagaaccagctctacaacgaactca |
| | | atcttggtcggagagaggagtacgacgtgctggacaagcggagaggacgggaccc |
| | | agaaatgggcgggaagccgcgcagaaagaatccccaagagggcctgtacaacgag |
| | | ctccaaaaggataagatggcagaagcctatagcgagattggtatgaaaggggaac |
| | | gcagaagaggcaaaggccacgacggactgtaccagggactcagcaccgccaccaa |
| | | ggacacctatgacgctcttcacatgcaggccctgccgcctcgg |
| 104881 | 927 | MALPVTALLLPLALLLHAARPqvqlqesgpglvkpsetlsltctvsgvslpdygv |
| CAR7 | | swirqppgkglewigviwgsettyyssslksrvtiskdnsknqvslklssvtaad |
| Full-aa | | tavyycakhyyyggsyamdywgqgtivtvssggggsggggsggggsggggseivm |
| | | tqspatlslspgeratlscrasqdiskylnwyqqkpgqaprlliyhtsrlhsgip |
| | | arfsgsgsgtdytltisslqpedfavyfcqqgntlpytfgqgtkleiktttpapr |
| | | pptpaptiasqplslrpeacrpaaggavhtrgldfacdiyiwaplagtogvills |
| | | lvitlyckrgrkkllyifkqpfmrpvqttgeedgcscrfpeeeeggcelrvkfsr |
| | | sadapaykqgqnqlynelnlgrreeydvldkrrgrdpemggkprrknpqeglyne |
| | | lqkdkmaeayseigmkgerrrgkghdglycolstatkdtydalhmqalppr |

CAR8

| | | |
|---|---|---|
| CAR8 scFv | 928 | qvqlqesgpglvkpsetlsltctvsgvslpdygvswirqppgkglewigviwgse |
| domain | | ttyyqsslksrvtiskdnsknqvslklssvtaadtavyycakhyyyggsyamdyw |
| | | gqgtivtvssggggsggggsggggsggggseivmtqspatlslspgeratlscra |
| | | sqdiskylnwyqqkpgqaprlliyhtsrlhsgiparfsgsgsgtdytltisslqp |
| | | edfavyfcqqgntlpytfgqgtkleik |
| 100798 | 929 | atggcactgcctgtcactgccctcctgctgcctctggccctccttctgcatgccg |
| CAR8- | | ccaggccccaagtccagctgcaagagtcaggacccggactggtgaagccgtctga |
| Soluble scFv-nt | | gactctctcactgacttgtaccgtcagcggcgtgtccctccccgactacggagtg |
| | | tcatggatccgccaacctcccgggaaagggcttgaatggattggtgtcatctggg |
| | | gttctgaaaccacctactaccagtcttccctgaagtccagggtgaccatcagcaa |
| | | ggataattccaagaaccaggtcagccttaagctgtcatctgtgaccgctgctgac |
| | | accgccgtgtattactgcgccaagcactactattacggaggaagctacgctatgg |
| | | actattggggacagggcactctcgtgactgtgagcagcggcggtggagggtctgg |
| | | aggtggaggatccggtggtggtgggtcaggcggaggagggagcgagattgtgatg |
| | | actcagtcaccagccaccctttctctttcacccggcgagagagcaaccctgagct |
| | | gtagagccagccaggacatttctaagtacctcaactggtatcagcaaaaaccggg |
| | | gcaggcccctcgcctcctgatctaccatacctcacgccttcactctggtatcccc |
| | | gctcggtttagcggatcaggatctggtaccgactacactctgaccatttccagcc |
| | | tgcagccagaagatttcgcagtgtatttctgccagcagggcaatacccttcctta |
| | | caccttcggtcagggaaccaagctcgaaatcaagcaccatcaccatcatcatcac |
| | | cac |
| 100798 | 930 | MALPVTALLLPLALLLHAARPqvqlqesgpglvkpsetlsltctvsgvslpdygv |
| CAR8- | | swirqppgkglewigviwgsettyyqsslksrvtiskdnsknqvslklssvtaad |
| Soluble scFv-aa | | tavyycakhyyyggsyamdywgqgtivtvssggggsggggsggggsggggseivm |
| | | tqspatlslspgeratlscrasqdiskylnwyqqkpgqaprlliyhtsrlhsgip |
| | | arfsgsgsgtdytltisslqpedfavyfcqqgntlpytfgqgtkleikhhhhhhh |
| | | h |
| 104882 CAR8- | 931 | atggctctgcccgtgaccgcactcctcctgccactggctctgctgcttcacgccg |
| Full-nt | | ctcgcccacaagtccagcttcaagaatcagggcctggtctggtgaagccatctga |
| | | gactctgtccctcacttgcaccgtgagcggagtgtccctcccagactacggagtg |
| | | agctggattagacagcctcccggaaagggactggagtggatcggagtgatttggg |
| | | gtagcgaaaccacttactatcaatcttccctgaagtcacgggtcaccatttcaaa |
| | | ggataactcaaagaatcaagtgagcctcaagctctcatcagtcaccgccgctgac |
| | | accgccgtgtattactgtgccaagcattactactatggagggtcctacgccatgg |
| | | actactggggccagggaactctggtcactgtgtcatctggtggaggaggtagcgg |
| | | aggaggcgggagcggtggaggtggctccggaggcggtgggtcagaaatcgtgatg |
| | | acccagagccctgcaaccctgtccctttctcccggggaacgggctaccctttctt |
| | | gtcgggcatcacaagatatctcaaaatacctcaattggtatcaacagaagccggg |
| | | acaggcccctaggcttcttatctaccacacctctcgcctgcatagcgggattccc |
| | | gcacgctttagcgggtctggaagcgggaccgactacactctgaccatctcatctc |
| | | tccagcccgaggacttcgccgtctacttctgccagcagggtaacaccctgccgta |
| | | caccttcggccagggcaccaagcttgagatcaaaaccactactcccgctccaagg |
| | | ccacccacccctgccccgaccatcgcctctcagccgctttccctgcgtccggagg |
| | | catgtagacccgcagctggtggggccgtgcatacccggggtcttgacttcgcctg |
| | | cgatatctacatttgggcccctctggctggtacttgcggggtcctgctgctttca |
| | | ctcgtgatcactctttactgtaagcgcggtcggaagaagctgctgtacatcttta |
| | | agcaacccttcatgaggcctgtgcagactactcaagaggaggacggctgttcatg |
| | | ccggttcccagaggaggaggaaggcggctgcgaactgcgcgtgaaattcagccgc |
| | | agcgcagatgctccagcctacaagcaggggcagaaccagctctacaacgaactca |
| | | atcttggtcggagagaggagtacgacgtgctggacaagcggagaggacgggaccc |
| | | agaaatgggcgggaagccgcgcagaaagaatccccaagagggcctgtacaacgag |
| | | ctccaaaaggataagatggcagaagcctatagcgagattggtatgaaaggggaac |
| | | gcagaagaggcaaaggccacgacggactgtaccagggactcagcaccgccaccaa |
| | | ggacacctatgacgctcttcacatgcaggccctgccgcctcgg |
| 104882 | 932 | MALPVTALLLPLALLLHAARPqvqlqesgpglvkpsetlsltctvsgvslpdygv |
| CAR8-Full-aa | | swirqppgkglewigviwgsettyyqsslksrvtiskdnsknqvslklssvtaad |
| | | tavyycakhyyyggsyamdywgqgtivtvssggggsggggsggggsggggseivm |
| | | tqspatlslspgeratlscrasqdiskylnwyqqkpgqaprlliyhtsrlhsgip |
| | | arfsgsgsgtdytltisslqpedfavyfcqqgntlpytfgqgtkleiktttpapr |
| | | pptpaptiasqplslrpeacrpaaggavhtrgldfacdiyiwaplagtogvills |
| | | lvitlyckrgrkkllyifkqpfmrpvqttgeedgcscrfpeeeeggcelrvkfsr |
| | | sadapaykqgqnqlynelnlgrreeydvldkrrgrdpemggkprrknpqeglyne |
| | | lqkdkmaeayseigmkgerrrgkghdglycolstatkdtydalhmqalppr |

CAR9

| | | |
|---|---|---|
| CAR9 scFv | 933 | eivmtqspatlslspgeratlscrasqdiskylnwyqqkpgqaprlliyhtsrlh |
| domain | | sgiparfsgsgsgtdytltisslqpedfavyfcqqgntlpytfgqgtkleikggg |
| | | gsggggsggggsggggsqvqlqesgpglvkpsetlsltctvsgvslpdygvswir |
| | | qppgkglewigviwgsettyynsslksrvtiskdnsknqvslklssvtaadtavy |
| | | ycakhyyyggsyamdywgqgtivtvss |
| 99789 | 934 | atggccctcccagtgaccgctctgctgctgcctctcgcacttcttctccatgccg |
| CAR9- | | ctcggcctgagatcgtcatgacccaaagccccgctaccctgtccctgtcacccgg |
| Soluble scFv-nt | | cgagagggcaaccctttcatgcagggccagccaggacatttctaagtacctcaac |
| | | tggtatcagcagaagccagggcaggctcctcgcctgctgatctaccacaccagcc |
| | | gcctccacagcggtatccccgccagattttccgggagcgggtctggaaccgacta |
| | | caccctcaccatctcttctctgcagcccgaggatttcgccgtctatttctgccag |
| | | caggggaatactctgccgtacaccttcggtcaaggtaccaagctggaaatcaagg |
| | | gaggcggaggatcaggcggtggcggaagcggaggaggtggctccggaggaggagg |
| | | ttcccaagtgcagcttcaagaatcaggacccggacttgtgaagccatcagaaacc |
| | | ctctccctgacttgtaccgtgtccggtgtgagcctccccgactacggagtctctt |
| | | ggattcgccagcctccggggaagggtcttgaatggattggggtgatttggggatc |
| | | agagactacttactacaattcatcacttaagtcacgggtcaccatcagcaaagat |
| | | aatagcaagaaccaagtgtcacttaagctgtcatctgtgaccgccgctgacaccg |
| | | ccgtgtactattgtgccaaacattactattacggagggtcttatgctatggacta |
| | | ctggggacaggggaccctggtgactgtctctagccatcaccatcaccaccatcat |
| | | cac |
| 99789 | 935 | MALPVTALLLPLALLLHAARPeivmtqspatlslspgeratlscrasqdiskyln |
| CAR9- | | wyqqkpgqaprlliyhtsrlhsgiparfsgsgsgtdytltisslqpedfavyfcq |
| Soluble scFv-aa | | qgntlpytfgqgtkleikggggsggggsggggsggggsqvqlqesgpglvkpset |
| | | lsltctvsgvslpdygvswirqppgkglewigviwgsettyynsslksrvtiskd |
| | | nsknqvslklssvtaadtavyycakhyyyggsyamdywgqgtivtvsshhhhhhh |
| | | h |
| 105974 | 936 | atggccctccctgtcaccgccctgctgcttccgctggctcttctgctccacgccg |
| CAR9-Full-nt | | ctcggcccgaaattgtgatgacccagtcacccgccactcttagcctttcacccgg |
| | | tgagcgcgcaaccctgtcttgcagagcctcccaagacatctcaaaataccttaat |
| | | tggtatcaacagaagcccggacaggctcctcgccttctgatctaccacaccagcc |
| | | ggctccattctggaatccctgccaggttcagcggtagcggatctgggaccgacta |
| | | caccctcactatcagctcactgcagccagaggacttcgctgtctatttctgtcag |
| | | caagggaacaccctgccctacacctttggacagggcaccaagctcgagattaaag |
| | | gtggaggtggcagcggaggaggtgggtccggcggtggaggaagcggaggcggtgg |
| | | gagccaggtccaactccaagaaagcggaccgggtcttgtgaagccatcagaaact |
| | | ctttcactgacttgtactgtgagcggagtgtctctccccgattacggggtgtctt |
| | | ggatcagacagccaccggggaagggtctggaatggattggagtgatttggggctc |
| | | tgagactacttactacaactcatccctcaagtcacgcgtcaccatctcaaaggac |
| | | aactctaagaatcaggtgtcactgaaactgtcatctgtgaccgcagccgacaccg |
| | | ccgtgtactattgcgctaagcattactattatggcgggagctacgcaatggatta |
| | | ctggggacagggtactctggtcaccgtgtccagcaccactaccccagcaccgagg |
| | | ccacccaccccggctcctaccatcgcctcccagcctctgtccctgcgtccggagg |
| | | catgtagacccgcagctggtggggccgtgcatacccggggtcttgacttcgcctg |
| | | cgatatctacatttgggcccctctggctggtacttgcggggtcctgctgctttca |
| | | ctcgtgatcactctttactgtaagcgcggtcggaagaagctgctgtacatcttta |
| | | agcaacccttcatgaggcctgtgcagactactcaagaggaggacggctgttcatg |
| | | ccggttcccagaggaggaggaaggcggctgcgaactgcgcgtgaaattcagccgc |
| | | agcgcagatgctccagcctacaagcaggggcagaaccagctctacaacgaactca |
| | | atcttggtcggagagaggagtacgacgtgctggacaagcggagaggacgggaccc |
| | | agaaatgggcgggaagccgcgcagaaagaatccccaagagggcctgtacaacgag |
| | | ctccaaaaggataagatggcagaagcctatagcgagattggtatgaaaggggaac |
| | | gcagaagaggcaaaggccacgacggactgtaccagggactcagcaccgccaccaa |
| | | ggacacctatgacgctcttcacatgcaggccctgccgcctcgg |
| 105974 | 937 | MALPVTALLLPLALLLHAARPeivmtqspatlslspgeratlscrasqdiskyln |
| CAR9-Full-aa | | wyqqkpgqaprlliyhtsrlhsgiparfsgsgsgtdytltisslqpedfavyfcq |
| | | qgntlpytfgqgtkleikggggsggggsggggsggggsqvqlqesgpglvkpset |
| | | lsltctvsgvslpdygvswirqppgkglewigviwgsettyynsslksrvtiskd |
| | | nsknqvslklssvtaadtavyycakhyyyggsyamdywgqgtivtvsstttpapr |
| | | pptpaptiasqplslrpeacrpaaggavhtrgldfacdiyiwaplagtogvills |
| | | lvitlyckrgrkkllyifkqpfmrpvqttgeedgcscrfpeeeeggcelrvkfsr |
| | | sadapaykqgqnqlynelnlgrreeydvldkrrgrdpemggkprrknpqeglyne |
| | | lqkdkmaeayseigmkgerrrgkghdglycolstatkdtydalhmqalppr |

CAR10

| | | |
|---|---|---|
| CAR10 scFv | 938 | qvqlqesgpglvkpsetlsltctvsgvslpdygvswirqppgkglewigviwgse |
| domain | | ttyynsslksrvtiskdnsknqvslklssvtaadtavyycakhyyyggsyamdyw |
| | | gqgtivtvssggggsggggsggggsggggseivmtqspatlslspgeratlscra |
| | | sqdiskylnwyqqkpgqaprlliyhtsrlhsgiparfsgsgsgtdytltisslqp |
| | | edfavyfcqqgntlpytfgqgtkleik |
| 100796 | 939 | atggcactgcctgtcactgccctcctgctgcctctggccctccttctgcatgccg |
| CAR10- | | ccaggccccaagtccagctgcaagagtcaggacccggactggtgaagccgtctga |
| Soluble scFv-nt | | gactctctcactgacttgtaccgtcagcggcgtgtccctccccgactacggagtg |
| | | tcatggatccgccaacctcccgggaaagggcttgaatggattggtgtcatctggg |
| | | gttctgaaaccacctactacaactcttccctgaagtccagggtgaccatcagcaa |
| | | ggataattccaagaaccaggtcagccttaagctgtcatctgtgaccgctgctgac |
| | | accgccgtgtattactgcgccaagcactactattacggaggaagctacgctatgg |
| | | actattggggacagggcactctcgtgactgtgagcagcggcggtggagggtctgg |
| | | aggtggaggatccggtggtggtgggtcaggcggaggagggagcgagattgtgatg |
| | | actcagtcaccagccaccctttctctttcacccggcgagagagcaaccctgagct |
| | | gtagagccagccaggacatttctaagtacctcaactggtatcagcaaaaaccggg |
| | | gcaggcccctcgcctcctgatctaccatacctcacgccttcactctggtatcccc |
| | | gctcggtttagcggatcaggatctggtaccgactacactctgaccatttccagcc |
| | | tgcagccagaagatttcgcagtgtatttctgccagcagggcaatacccttcctta |
| | | caccttcggtcagggaaccaagctcgaaatcaagcaccatcaccatcatcaccac |
| | | cat |
| 100796 | 940 | MALPVTALLLPLALLLHAARPqvqlqesgpglvkpsetlsltctvsgvslpdygv |
| CAR10- | | swirqppgkglewigviwgsettyynsslksrvtiskdnsknqvslklssvtaad |
| Soluble scFv-aa | | tavyycakhyyyggsyamdywgqgtivtvssggggsggggsggggsggggseivm |
| | | tqspatlslspgeratlscrasqdiskylnwyqqkpgqaprlliyhtsrlhsgip |
| | | arfsgsgsgtdytltisslqpedfavyfcqqgntlpytfgqgtkleikhhhhhhh |
| | | h |
| 105975 CAR10 | 941 | atggccctccctgtcaccgccctgctgcttccgctggctcttctgctccacgccg |
| Full-nt | | ctcggcccgaaattgtgatgacccagtcacccgccactcttagcctttcacccgg |
| | | tgagcgcgcaaccctgtcttgcagagcctcccaagacatctcaaaataccttaat |
| | | tggtatcaacagaagcccggacaggctcctcgccttctgatctaccacaccagcc |
| | | ggctccattctggaatccctgccaggttcagcggtagcggatctgggaccgacta |
| | | caccctcactatcagctcactgcagccagaggacttcgctgtctatttctgtcag |
| | | caagggaacaccctgccctacacctttggacagggcaccaagctcgagattaaag |
| | | gtggaggtggcagcggaggaggtgggtccggcggtggaggaagcggaggcggtgg |
| | | gagccaggtccaactccaagaaagcggaccgggtcttgtgaagccatcagaaact |
| | | ctttcactgacttgtactgtgagcggagtgtctctccccgattacggggtgtctt |
| | | ggatcagacagccaccggggaagggtctggaatggattggagtgatttggggctc |
| | | tgagactacttactacaactcatccctcaagtcacgcgtcaccatctcaaaggac |
| | | aactctaagaatcaggtgtcactgaaactgtcatctgtgaccgcagccgacaccg |
| | | ccgtgtactattgcgctaagcattactattatggcgggagctacgcaatggatta |
| | | ctggggacagggtactctggtcaccgtgtccagcaccactaccccagcaccgagg |
| | | ccacccaccccggctcctaccatcgcctcccagcctctgtccctgcgtccggagg |
| | | catgtagacccgcagctggtggggccgtgcatacccggggtcttgacttcgcctg |
| | | cgatatctacatttgggcccctctggctggtacttgcggggtcctgctgctttca |
| | | ctcgtgatcactctttactgtaagcgcggtcggaagaagctgctgtacatcttta |
| | | agcaacccttcatgaggcctgtgcagactactcaagaggaggacggctgttcatg |
| | | ccggttcccagaggaggaggaaggcggctgcgaactgcgcgtgaaattcagccgc |
| | | agcgcagatgctccagcctacaagcaggggcagaaccagctctacaacgaactca |
| | | atcttggtcggagagaggagtacgacgtgctggacaagcggagaggacgggaccc |
| | | agaaatgggcgggaagccgcgcagaaagaatccccaagagggcctgtacaacgag |
| | | ctccaaaaggataagatggcagaagcctatagcgagattggtatgaaaggggaac |
| | | gcagaagaggcaaaggccacgacggactgtaccagggactcagcaccgccaccaa |
| | | ggacacctatgacgctcttcacatgcaggccctgccgcctcgg |
| 105975 | 942 | MALPVTALLLPLALLLHAARPEIVMTQSPATLSLSPGERATLSCRASQDISKYLN |
| CAR10 Full-aa | | WYQQKPGQAPRLLIYHTSRLHSGIPARFSGSGSGTDYTLTISSLQPEDFAVYFCQ |
| | | QGNTLPYTFGQGTKLEIKGGGGSGGGGSGGGGSGGGGSQVQLQESGPGLVKPSET |
| | | LSLTCTVSGVSLPDYGVSWIRQPPGKGLEWIGVIWGSETTYYNSSLKSRVTISKD |
| | | NSKNQVSLKLSSVTAADTAVYYCAKHYYYGGSYAMDYWGQGTLVTVSSTTTPAPR |
| | | PPTPAPTIASQPLSLRPEACRPAAGGAVHTRGLDFACDIYIWAPLAGTCGVLLLS |
| | | LVITLYCKRGRKKLLYIFKQPFMRPVQTTQEEDGCSCRFPEEEEGGCELRVKFSR |
| | | SADAPAYKQGQNQLYNELNLGRREEYDVLDKRRGRDPEMGGKPRRKNPQEGLYNE |
| | | LQKDKMAEAYSEIGMKGERRRGKGHDGLYQGLSTATKDTYDALHMQALPPR |

CAR11

| | | |
|---|---|---|
| CAR11 scFv | 943 | eivmtqspatlslspgeratlscrasqdiskylnwyqqkpgqaprlliyhtsrlh |
| domain | | sgiparfsgsgsgtdytltisslqpedfavyfcqqgntlpytfgqgtkleikggg |
| | | gsggggsggggsqvqlqesgpglvkpsetlsltctvsgvslpdygvswirqppgk |
| | | glewigviwgsettyynsslksrvtiskdnsknqvslklssvtaadtavyycakh |
| | | yyyggsyamdywgqgtivtvss |
| 103101 | 944 | Atggccctccctgtcaccgccctgctgcttccgctggctcttctgctccacgccg |
| CAR11- | | ctcggcccgaaattgtgatgacccagtcacccgccactcttagcctttcacccgg |
| Soluble scFv-nt | | tgagcgcgcaaccctgtcttgcagagcctcccaagacatctcaaaataccttaat |
| | | tggtatcaacagaagcccggacaggctcctcgccttctgatctaccacaccagcc |
| | | ggctccattctggaatccctgccaggttcagcggtagcggatctgggaccgacta |
| | | caccctcactatcagctcactgcagccagaggacttcgctgtctatttctgtcag |
| | | caagggaacaccctgccctacacctttggacagggcaccaagctcgagattaaag |
| | | gtggaggtggcagcggaggaggtgggtccggcggtggaggaagccaggtccaact |
| | | ccaagaaagcggaccgggtcttgtgaagccatcagaaactctttcactgacttgt |
| | | actgtgagcggagtgtctctccccgattacggggtgtcttggatcagacagccac |
| | | cggggaagggtctggaatggattggagtgatttggggctctgagactacttacta |
| | | caattcatccctcaagtcacgcgtcaccatctcaaaggacaactctaagaatcag |
| | | gtgtcactgaaactgtcatctgtgaccgcagccgacaccgccgtgtactattgcg |
| | | ctaagcattactattatggcgggagctacgcaatggattactggggacagggtac |
| | | tctggtcaccgtgtccagccaccaccatcatcaccatcaccat |
| 103101 | 945 | MALPVTALLLPLALLLHAARPeivmtqspatlslspgeratlscrasqdiskyln |
| CAR11- | | wyqqkpgqaprlliyhtsrlhsgiparfsgsgsgtdytltisslqpedfavyfcq |
| Soluble scFv-aa | | qgntlpytfgqgtkleikggggsggggsggggsqvqlqesgpglvkpsetlsltc |
| | | tvsgvslpdygvswirqppgkglewigviwgsettyynsslksrvtiskdnsknq |
| | | vslklssvtaadtavyycakhyyyggsyamdywgqgtivtvsshhhhhhhh |
| 105976 CAR11 | 946 | atggctctgcccgtgaccgcactcctcctgccactggctctgctgcttcacgccg |
| Full-nt | | ctcgcccacaagtccagcttcaagaatcagggcctggtctggtgaagccatctga |
| | | gactctgtccctcacttgcaccgtgagcggagtgtccctcccagactacggagtg |
| | | agctggattagacagcctcccggaaagggactggagtggatcggagtgatttggg |
| | | gtagcgaaaccacttactataactcttccctgaagtcacgggtcaccatttcaaa |
| | | ggataactcaaagaatcaagtgagcctcaagctctcatcagtcaccgccgctgac |
| | | accgccgtgtattactgtgccaagcattactactatggagggtcctacgccatgg |
| | | actactggggccagggaactctggtcactgtgtcatctggtggaggaggtagcgg |
| | | aggaggcgggagcggtggaggtggctccggaggtggcggaagcgaaatcgtgatg |
| | | acccagagccctgcaaccctgtccctttctcccggggaacgggctaccctttctt |
| | | gtcgggcatcacaagatatctcaaaatacctcaattggtatcaacagaagccggg |
| | | acaggcccctaggcttcttatctaccacacctctcgcctgcatagcgggattccc |
| | | gcacgctttagcgggtctggaagcgggaccgactacactctgaccatctcatctc |
| | | tccagcccgaggacttcgccgtctacttctgccagcagggtaacaccctgccgta |
| | | caccttcggccagggcaccaagcttgagatcaaaaccactactcccgctccaagg |
| | | ccacccacccctgccccgaccatcgcctctcagccgctttccctgcgtccggagg |
| | | catgtagacccgcagctggtggggccgtgcatacccggggtcttgacttcgcctg |
| | | cgatatctacatttgggcccctctggctggtacttgcggggtcctgctgctttca |
| | | ctcgtgatcactctttactgtaagcgcggtcggaagaagctgctgtacatcttta |
| | | agcaacccttcatgaggcctgtgcagactactcaagaggaggacggctgttcatg |
| | | ccggttcccagaggaggaggaaggcggctgcgaactgcgcgtgaaattcagccgc |
| | | agcgcagatgctccagcctacaagcaggggcagaaccagctctacaacgaactca |
| | | atcttggtcggagagaggagtacgacgtgctggacaagcggagaggacgggaccc |
| | | agaaatgggcgggaagccgcgcagaaagaatccccaagagggcctgtacaacgag |
| | | ctccaaaaggataagatggcagaagcctatagcgagattggtatgaaaggggaac |
| | | gcagaagaggcaaaggccacgacggactgtaccagggactcagcaccgccaccaa |
| | | ggacacctatgacgctcttcacatgcaggccctgccgcctcgg |
| 105976 | 947 | MALPVTALLLPLALLLHAARPQVQLQESGPGLVKPSETLSLTCTVSGVSLPDYGV |
| CAR11 Full-aa | | SWIRQPPGKGLEWIGVIWGSETTYYNSSLKSRVTISKDNSKNQVSLKLSSVTAAD |
| | | TAVYYCAKHYYYGGSYAMDYWGQGTLVTVSSGGGGSGGGGSGGGGSGGGGSEIVM |
| | | TQSPATLSLSPGERATLSCRASQDISKYLNWYQQKPGQAPRLLIYHTSRLHSGIP |
| | | ARFSGSGSGTDYTLTISSLQPEDFAVYFCQQGNTLPYTFGQGTKLEIKTTTPAPR |
| | | PPTPAPTIASQPLSLRPEACRPAAGGAVHTRGLDFACDIYIWAPLAGTCGVLLLS |
| | | LVITLYCKRGRKKLLYIFKQPFMRPVQTTQEEDGCSCRFPEEEEGGCELRVKFSR |
| | | SADAPAYKQGQNQLYNELNLGRREEYDVLDKRRGRDPEMGGKPRRKNPQEGLYNE |
| | | LQKDKMAEAYSEIGMKGERRRGKGHDGLYQGLSTATKDTYDALHMQALPPR |

CAR12

| | | |
|---|---|---|
| CAR12 | 948 | qvqlqesgpglvkpsetlsltctvsgvslpdygvswirqppgkglewigviwgse |
| scFv domain | | ttyynsslksrvtiskdnsknqvslklssvtaadtavyycakhyyyggsyamdyw |
| | | gqgtivtvssggggsggggsggggseivmtqspatlslspgeratlscrasqdis |
| | | kylnwyqqkpgqaprlliyhtsrlhsgiparfsgsgsgtdytltisslqpedfav |
| | | yfcqqgntlpytfgqgtkleik |
| 103104 | 949 | atggctctgcccgtgaccgcactcctcctgccactggctctgctgcttcacgccg |
| CAR12- | | ctcgcccacaagtccagcttcaagaatcagggcctggtctggtgaagccatctga |
| Soluble scFv-nt | | gactctgtccctcacttgcaccgtgagcggagtgtccctcccagactacggagtg |
| | | agctggattagacagcctcccggaaagggactggagtggatcggagtgatttggg |
| | | gtagcgaaaccacttactataactcttccctgaagtcacgggtcaccatttcaaa |
| | | ggataactcaaagaatcaagtgagcctcaagctctcatcagtcaccgccgctgac |
| | | accgccgtgtattactgtgccaagcattactactatggagggtcctacgccatgg |
| | | actactggggccagggaactctggtcactgtgtcatctggtggaggaggtagcgg |
| | | aggaggcgggagcggtggaggtggctccgaaatcgtgatgacccagagccctgca |
| | | accctgtccctttctcccggggaacgggctaccctttcttgtcgggcatcacaag |
| | | atatctcaaaatacctcaattggtatcaacagaagccgggacaggcccctaggct |
| | | tcttatctaccacacctctcgcctgcatagcgggattcccgcacgctttagcggg |
| | | tctggaagcgggaccgactacactctgaccatctcatctctccagcccgaggact |
| | | tcgccgtctacttctgccagcagggtaacaccctgccgtacaccttcggccaggg |
| | | caccaagcttgagatcaaacatcaccaccatcatcaccatcac |
| 103104 | 950 | MALPVTALLLPLALLLHAARPqvqlqesgpglvkpsetlsltctvsgvslpdygv |
| CAR12- | | swirqppgkglewigviwgsettyynsslksrvtiskdnsknqvslklssvtaad |
| Soluble scFv-aa | | tavyycakhyyyggsyamdywgqgtivtvssggggsggggsggggseivmtqspa |
| | | tlslspgeratlscrasqdiskylnwyqqkpgqaprlliyhtsrlhsgiparfsg |
| | | sgsgtdytltisslqpedfavyfcqqgntlpytfgqgtkleikhhhhhhhh |
| 105977 | 951 | atggccctccctgtcaccgccctgctgcttccgctggctcttctgctccacgccg |
| CAR12- | | ctcggcccgaaattgtgatgacccagtcacccgccactcttagcctttcacccgg |
| Full-nt | | tgagcgcgcaaccctgtcttgcagagcctcccaagacatctcaaaataccttaat |
| | | tggtatcaacagaagcccggacaggctcctcgccttctgatctaccacaccagcc |
| | | ggctccattctggaatccctgccaggttcagcggtagcggatctgggaccgacta |
| | | caccctcactatcagctcactgcagccagaggacttcgctgtctatttctgtcag |
| | | caagggaacaccctgccctacacctttggacagggcaccaagctcgagattaaag |
| | | gtggaggtggcagcggaggaggtgggtccggcggtggaggaagccaggtccaact |
| | | ccaagaaagcggaccgggtcttgtgaagccatcagaaactctttcactgacttgt |
| | | actgtgagcggagtgtctctccccgattacggggtgtcttggatcagacagccac |
| | | cggggaagggtctggaatggattggagtgatttggggctctgagactacttacta |
| | | caactcatccctcaagtcacgcgtcaccatctcaaaggacaactctaagaatcag |
| | | gtgtcactgaaactgtcatctgtgaccgcagccgacaccgccgtgtactattgcg |
| | | ctaagcattactattatggcgggagctacgcaatggattactggggacagggtac |
| | | tctggtcaccgtgtccagcaccactaccccagcaccgaggccacccaccccggct |
| | | cctaccatcgcctcccagcctctgtccctgcgtccggaggcatgtagacccgcag |
| | | ctggtggggccgtgcatacccggggtcttgacttcgcctgcgatatctacatttg |
| | | ggcccctctggctggtacttgcggggtcctgctgctttcactcgtgatcactctt |
| | | tactgtaagcgcggtcggaagaagctgctgtacatctttaagcaacccttcatga |
| | | ggcctgtgcagactactcaagaggaggacggctgttcatgccggttcccagagga |
| | | ggaggaaggcggctgcgaactgcgcgtgaaattcagccgcagcgcagatgctcca |
| | | gcctacaagcaggggcagaaccagctctacaacgaactcaatcttggtcggagag |
| | | aggagtacgacgtgctggacaagcggagaggacgggacccagaaatgggcgggaa |
| | | gccgcgcagaaagaatccccaagagggcctgtacaacgagctccaaaaggataag |
| | | atggcagaagcctatagcgagattggtatgaaaggggaacgcagaagaggcaaag |
| | | gccacgacggactgtaccagggactcagcaccgccaccaaggacacctatgacgc |
| | | tcttcacatgcaggccctgccgcctcgg |
| 105977 | 952 | MALPVTALLLPLALLLHAARPEIVMTQSPATLSLSPGERATLSCRASQDISKYLN |
| CAR12- | | WYQQKPGQAPRLLIYHTSRLHSGIPARFSGSGSGTDYTLTISSLQPEDFAVYFCQ |
| Full-aa | | QGNTLPYTFGQGTKLEIKGGGGSGGGGSGGGGSQVQLQESGPGLVKPSETLSLTC |
| | | TVSGVSLPDYGVSWIRQPPGKGLEWIGVIWGSETTYYNSSLKSRVTISKDNSKNQ |
| | | VSLKLSSVTAADTAVYYCAKHYYYGGSYAMDYWGQGTLVTVSSTTTPAPRPPTPA |
| | | PTIASQPLSLRPEACRPAAGGAVHTRGLDFACDIYIWAPLAGTCGVLLLSLVITL |
| | | YCKRGRKKLLYIFKQPFMRPVQTTQEEDGCSCRFPEEEEGGCELRVKFSRSADAP |
| | | AYKQGQNQLYNELNLGRREEYDVLDKRRGRDPEMGGKPRRKNPQEGLYNELQKDK |
| | | [sequence omitted] |

CTL019

| | | |
|---|---|---|
| CTL019- | 953 | atggccctgcccgtcaccgctctgctgctgccccttgctctgcttcttcatgcag |
| Soluble | | caaggccggacatccagatgacccaaaccacctcatccctctctgcctctcttgg |
| scFv-Histag- | | agacagggtgaccatttcttgtcgcgccagccaggacatcagcaagtatctgaac |
| nt | | tggtatcagcagaagccggacggaaccgtgaagctcctgatctaccatacctctc |
| | | gcctgcatagcggcgtgccctcacgcttctctggaagcggatcaggaaccgatta |
| | | ttctctcactatttcaaatcttgagcaggaagatattgccacctatttctgccag |
| | | cagggtaataccctgccctacaccttcggaggagggaccaagctcgaaatcaccg |
| | | gtggaggaggcagcggcggtggagggtctggtggaggtggttctgaggtgaagct |
| | | gcaagaatcaggccctggacttgtggccccttcacagtccctgagcgtgacttgc |
| | | accgtgtccggagtctccctgcccgactacggagtgtcatggatcagacaacctc |
| | | cacggaaaggactggaatggctcggtgtcatctggggtagcgaaactacttacta |
| | | caattcagccctcaaaagcaggctgactattatcaaggacaacagcaagtcccaa |
| | | gtctttcttaagatgaactcactccagactgacgacaccgcaatctactattgtg |
| | | ctaagcactactactacggaggatcctacgctatggattactggggacaaggtac |
| | | ttccgtcactgtctcttcacaccatcatcaccatcaccatcac |
| CTL019- | 954 | MALPVTALLLPLALLLHAARPdiqmtqttsslsaslgdrvtiscrasqdiskyln |
| Soluble | | wyqqkpdgtvklliyhtsrlhsgvpsrfsgsgsgtdysltisnleqediatyfcq |
| scFv-Histag- | | qgntlpytfgggtkleitggggsggggsggggsevklqesgpglvapsqslsvtc |
| aa | | tvsgvslpdygvswirqpprkglewlgviwgsettyynsalksrltiikdnsksq |
| | | vflkmnslqtddtaiyycakhyyyggsyamdywgqgtsvtvsshhhhhhhh |
| CTL019 Full- | 955 | atggccttaccagtgaccgccttgctcctgccgctggccttgctgctccacgccg |
| nt | | ccaggccggacatccagatgacacagactacatcctccctgtctgcctctctggg |
| | | agacagagtcaccatcagttgcagggcaagtcaggacattagtaaatatttaaat |
| | | tggtatcagcagaaaccagatggaactgttaaactcctgatctaccatacatcaa |
| | | gattacactcaggagtcccatcaaggttcagtggcagtgggtctggaacagatta |
| | | ttctctcaccattagcaacctggagcaagaagatattgccacttacttttgccaa |
| | | cagggtaatacgcttccgtacacgttcggaggggggaccaagctggagatcacag |
| | | gtggcggtggctcgggcggtggtgggtcgggtggcggcggatctgaggtgaaact |
| | | gcaggagtcaggacctggcctggtggcgccctcacagagcctgtccgtcacatgc |
| | | actgtctcaggggtctcattacccgactatggtgtaagctggattcgccagcctc |
| | | cacgaaagggtctggagtggctgggagtaatatggggtagtgaaaccacatacta |
| | | taattcagctctcaaatccagactgaccatcatcaaggacaactccaagagccaa |
| | | gttttcttaaaaatgaacagtctgcaaactgatgacacagccatttactactgtg |
| | | ccaaacattattactacggtggtagctatgctatggactactggggccaaggaac |
| | | ctcagtcaccgtctcctcaaccacgacgccagcgccgcgaccaccaacaccggcg |
| | | cccaccatcgcgtcgcagcccctgtccctgcgcccagaggcgtgccggccagcgg |
| | | cggggggcgcagtgcacacgagggggctggacttcgcctgtgatatctacatctg |
| | | ggcgcccttggccgggacttgtggggtccttctcctgtcactggttatcaccctt |
| | | tactgcaaacggggcagaaagaaactcctgtatatattcaaacaaccatttatga |
| | | gaccagtacaaactactcaagaggaagatggctgtagctgccgatttccagaaga |
| | | agaagaaggaggatgtgaactgagagtgaagttcagcaggagcgcagacgccccc |
| | | gcgtacaagcagggccagaaccagctctataacgagctcaatctaggacgaagag |
| | | aggagtacgatgttttggacaagagacgtggccgggaccctgagatggggggaaa |
| | | gccgagaaggaagaaccctcaggaaggcctgtacaatgaactgcagaaagataag |
| | | atggcggaggcctacagtgagattgggatgaaaggcgagcgccggaggggcaagg |
| | | ggcacgatggcctttaccagggtctcagtacagccaccaaggacacctacgacgc |
| | | ccttcacatgcaggccctgccccctcgc |
| CTL019 Full- | 956 | MALPVTALLLPLALLLHAARPdiqmtqttsslsaslgdrvtiscrasqdiskyln |
| aa | | wyqqkpdgtvklliyhtsrlhsgvpsrfsgsgsgtdysltisnleqediatyfcq |
| | | qgntlpytfgggtkleitggggsggggsggggsevklqesgpglvapsqslsvtc |
| | | tvsgvslpdygvswirqpprkglewlgviwgsettyynsalksrltiikdnsksq |
| | | vflkmnslqtddtaiyycakhyyyggsyamdywgqgtsvtvsstttpaprpptpa |
| | | ptiasqplslrpeacrpaaggavhtrgldfacdiyiwaplagtogvlllslvitl |
| | | yckrgrkkllyifkqpfmrpvqttqeedgcscrfpeeeeggcelrvkfsrsadap |
| | | aykqgqnqlynelnlgrreeydvldkrrgrdpemggkprrknpqeglynelqkdk |
| | | [sequence omitted] |
| CTL019 scFv | 957 | diqmtqttsslsaslgdrvtiscrasqdiskylnwyqqkpdgtvklliyhtsrlh |
| domain | | sgvpsrfsgsgsgtdysltisnleqediatyfcqqgntlpytfgggtkleitggg |
| | | gsggggsggggsevklqesgpglvapsqslsvtctvsgvslpdygvswirqpprk |
| | | glewlgviwgsettyynsalksrltiikdnsksqvflkmnslqtddtaiyycakh |
| | | yyyggsyamdywgqgtsvtvss |
| mCAR1 scFv | 983 | QVQLLESGAELVRPGSSVKISCKASGYAFSSYWMNWVKQRPGQGLEWIGQIYPGD |
| | | GDTNYNGKFKGQATLTADKSSSTAYMQLSGLTSEDSAVYSCARKTISSVVDFYFD |
| | | YWGQGTTVTGGGSGGGSGGGSGGGSELVLTQSPKFMSTSVGDRVSVTCKASQNVG |
| | | TNVAWYQQKPGQSPKPLIYSATYRNSGVPDRFTGSGSGTDFTLTITNVQSKDLAD |
| | | YFCQYNRYPYTSFFFTKLEIKRRS |
| mCAR1 Full-aa | 984 | QVQLLESGAELVRPGSSVKISCKASGYAFSSYWMNWVKQRPGQGLEWIGQIYPGD |
| | | GDTNYNGKFKGQATLTADKSSSTAYMQLSGLTSEDSAVYSCARKTISSVVDFYFD |
| | | YWGQGTTVTGGGSGGGSGGGSGGGSELVLTQSPKFMSTSVGDRVSVTCKASQNVG |
| | | TNVAWYQQKPGQSPKPLIYSATYRNSGVPDRFTGSGSGTDFTLTITNVQSKDLAD |
| | | YFCQYNRYPYTSFFFTKLEIKRRSKIEVMYPPPYLDNEKSNGTIIHVKGKHLCPS |
| | | PLFPGPSKPFWVLVVVGGVLACYSLLVTVAFIIFWVRSKRSRLLHSDYMNMTPRR |
| | | PGPTRKHYQPYAPPRDFAAYRSRVKFSRSADAPAYQQGQNQLYNELNLGRREEYD |
| | | VLDKRRGRDPEMGGKPRRKNPQEGLYNELQKDKMAEAYSEIGMKGERRRGKGHDG |
| | | LYQGLSTATKDTYDALHMQALPPR |
| mCAR2 scFv | 985 | DIQMTQTTSSLSASLGDRVTISCRASQDISKYLNWYQQKPDGTVKLLIYHTSRLH |
| | | SGVPSRFSGSGSGTDYSLTISNLEQEDIATYFCQQGNTLPYTFGGGTKLEITGST |
| | | SGSGKPGSGEGSTKGEVKLQESGPGLVAPSQSLSVTCTVSGVSLPDYGVSWIRQP |
| | | PRKGLEWLGVIWGSETTYYNSALKSRLTIIKDNSKSQVFLKMNSLQTDDTAIYYC |
| | | AKHYYYGGSYAMDYWGQGTSVTVSSE |
| mCAR2 CAR-aa | 986 | DIQMTQTTSSLSASLGDRVTISCRASQDISKYLNWYQQKPDGTVKLLIYHTSRLH |
| | | SGVPSRFSGSGSGTDYSLTISNLEQEDIATYFCQQGNTLPYTFGGGTKLEITGST |
| | | SGSGKPGSGEGSTKGEVKLQESGPGLVAPSQSLSVTCTVSGVSLPDYGVSWIRQP |
| | | PRKGLEWLGVIWGSETTYYNSALKSRLTIIKDNSKSQVFLKMNSLQTDDTAIY |
| | | YCAKHYYYGGSYAMDYWGQGTSVTVSSESKYGPPCPPCPMFWVLVVVGGVLACYS |
| | | LLVTVAFIIFWVKRGRKKLLYIFKQPFMRPVQTTQEEDGCSCRFEEEEGGCELRV |
| | | KFSRSADAPAYQQGQNQLYNELNLGRREEYDVLDKRRGRDPEMGGKPRRKNPQEG |
| | | LYNELQKDKMAEAYSEIGMKGERRRGKGHDGLYQGLSTATKDTYDALHMQALPPR |
| | | L |
| mCAR2 Full-aa | 987 | DIQMTQTT SSLSASLGDR VTISCRASQD ISKYLNWYQQ KPDGTVKLLI |
| | | YHTSRLHSGV PSRFSGSGSG TDYSLTISNL EQEDIATYFC QQGNTLPYTF |
| | | GGGTKLEITG STSGSGKPGS GEGSTKGEVK LQESGPGLVA PSQSLSVTCT |
| | | VSGVSLPDYG VSWIRQPPRK GLEWLGVIWG SETTYYNSAL KSRLTIIKDN |
| | | SKSQVFLKMN SLQTDDTAIY YCAKHYYYGG SYAMDYWGQG TSVTVSSESK |
| | | YGPPCPPCPM FWVLVVVGGV LACYSLLVTV |
| | | AFIIFWVKRG RKKLLYIFKQ PFMRPVQTTQ EEDGCSCRFE EEEGGCELRV |
| | | KFSRSADAPA YQQGQNQLYN ELNLGRREEY DVLDKRRGRD PEMGGKPRRK |
| | | NPQEGLYNEL QKDKMAEAYS EIGMKGERRR GKGHDGLYQG LSTATKDTYD |
| | | ALHMQALPPR LEGGGEGRGS LLTCGDVEEN PGPRMLLLVT SLLLCELPHP |
| | | AFLLIPRKVC NGIGIGEFKD SLSINATNIK HFKNCTSISG DLHILPVAFR |
| | | GDSFTHTPPL DPQELDILKT VKEITGFLLI QAWPENRTDL HAFENLEIIR |
| | | GRTKQHGQFS LAVVSLNITS LGLRSLKEIS DGDVIISGNK NLCYANTINW |
| | | KKLFGTSGQK TKIISNRGEN SCKATGQVCH ALCSPEGCWG PEPRDCVSCR |
| | | NVSRGRECVD KCNLLEGEPR EFVENSECIQ CHPECLPQAM NITCTGRGPD |
| | | NCIQCAHYID GPHCVKTCPA GVMGENNTLV WKYADAGHVC HLCHPNCTYG |
| | | CTGPGLEGCP TNGPKIPSIA TGMVGALLLL LVVALGIGLF M |
| mCAR3 scFv | 988 | DIQMTQTTSSLSASLGDRVTISCRASQDISKYLNWYQQKPDGTVKLLIYHTSRLH |
| | | SGVPSRFSGSGSGTDYSLTISNLEQEDIATYFCQQGNTLPYTFGGGTKLEITGST |
| | | SGSGKPGSGEGSTKGEVKLQESGPGLVAPSQSLSVTCTVSGVSLPDYGVSWIRQP |
| | | PRKGLEWLGVIWGSETTYYNSALKSRLTIIKDNSKSQVFLKMNSLQTDDTAIYYC |
| | | AKHYYYGGSYAMDYWGQGTSVTVSS |
| mCAR3 Full-aa | 989 | DIQMTQTTSSLSASLGDRVTISCRASQDISKYLNWYQQKPDGTVKLLIYHTSRLH |
| | | SGVPSRFSGSGSGTDYSLTISNLEQEDIATYFCQQGNTLPYTFGGGTKLEITGST |
| | | SGSGKPGSGEGSTKGEVKLQESGPGLVAPSQSLSVTCTVSGVSLPDYGVSWIRQP |
| | | PRKGLEWLGVIWGSETTYYNSALKSRLTIIKDNSKSQVFLKMNSLQTDDTAIYYC |
| | | AKHYYYGGSYAMDYWGQGTSVTVSSAAAIEVMYPPPYLDNEKSNGTIIHVKGKHL |
| | | CPSPLFPGPSKPFWVLVVVGGVLACYSLLVTVAFIIFWVRSKRSRLLHSDYMNMT |
| | | PRRPGPTRKHYQPYAPPRDFAAYRSRVKFSRSADAPAYQQGQNQLYNELNLGRRE |
| | | EYDVLDKRRGRDPEMGGKPRRKNPQEGLYNELQKDKMAEAYSEIGMKGERRRGKG |
| | | HDGLYQGLSTATKDTYDALHMQALPPR |
| SSJ25-C1 VH | 379 | QVQLLESGAELVRPGSSVKISCKASGYAFSSYWMNWVKQRPGQGLEWIGQIYPGD |
| sequence | | GDTNYNGKFKGQATLTADKSSSTAYMQLSGLTSEDSAVYSCARKTISSVVDFYFD |
| | | YWGQGTTVT |
| SSJ25-C1 VL | 380 | ELVLTQSPKFMSTSVGDRVSVTCKASQNVGTNVAWYQQKPGQSPKPLIYSATYRN |
| sequence | | SGVPDRFTGSGSGTDFTLTITNVQSKDLADYFYFCQYNRYPYTSGGGTKLEIKRR |
| | | S |

[0536] In some embodiments, the CD19 CAR or binding domain includes the amino acid sequence of CTL019, or is encoded by the nucleotide sequence of CTL019 according to Table 5 with or without the leader sequence or the his tag, or a sequence substantially identical thereto (e.g., at least 85%, 90%, 95% or higher identity).

[0537] In some embodiments, the CDRs are defined according to the Kabat numbering scheme, the Chothia numbering scheme, or a combination thereof.

[0538] The sequences of humanized CDR sequences of the scFv domains are shown in Table 15B for the heavy chain variable domains and in Table 15C for the light chain variable domains. “ID” stands for the respective SEQ ID NO for each CDR.

TABLE 15B
Heavy Chain Variable Domain CDRs (according to Kabat)

| | | | SEQ | | SEQ | | SEQ |
|---|---|---|---|---|---|---|---|
| Candidate | FW | HCDR1 | ID | HCDR2 | ID | HCDR3 | ID |
| murine_CART19 | | DYGVS | 958 | VIWGSETTYYNSALKS | 959 | HYYYGGSYAMDY | 960 |
| humanized_CART19 a | VH4 | DYGVS | 958 | VIWGSETTYY [symbol] S [symbol] LKS | 961 | HYYYGGSYAMDY | 960 |
| humanized_CART19 b | VH4 | DYGVS | 958 | VIWGSETTYY [symbol] S [symbol] LKS | 962 | HYYYGGSYAMDY | 960 |
| humanized_CART19 c | VH4 | DYGVS | 958 | VIWGSETTYYNS [symbol] LKS | 963 | HYYYGGSYAMDY | 960 |

TABLE 15C
Light Chain Variable Domain CDRs (according to Kabat)

| | | | SEQ | | SEQ | | SEQ |
|---|---|---|---|---|---|---|---|
| Candidate | FW | LCDR1 | ID | LCDR2 | ID | LCDR3 | ID |
| murine_CART19 | | RASQDISKYLN | 964 | HTSRLHS | 965 | QQGNTLPYT | 966 |
| humanized_CART19 a | VK3 | RASQDISKYLN | 964 | HTSRLHS | 965 | QQGNTLPYT | 966 |
| humanized_CART19 b | VK3 | RASQDISKYLN | 964 | HTSRLHS | 965 | QQGNTLPYT | 966 |
| humanized_CART19 c | VK3 | RASQDISKYLN | 964 | HTSRLHS | 965 | QQGNTLPYT | 966 |

[0539] In one embodiment, the CAR comprises a CAR molecule comprising a BCMA antigen binding domain (e.g., a murine, human or humanized antibody or antibody fragment that specifically binds to BCMA, e.g., human BCMA), a transmembrane domain, and an intracellular signaling domain (e.g., an intracellular signaling domain comprising a costimulatory domain and/or a primary signaling domain).

[0540] Exemplary CAR molecules are provided in Table 16, or Table 1 of WO2016/014565, or as otherwise described herein. The CAR molecules in Table 16 comprise a BCMA antigen binding domain, e.g., an amino acid sequence of any BCMA antigen binding domain provided in Table 11 or 12.

TABLE 16
Exemplary CAR molecules. Sequences are provided with a leader sequence.

| | | |
|---|---|---|
| | SEQ | |
| Name/ | ID | |
| Description | NO: | Sequence |

139109

| | | |
|---|---|---|
| 139109-aa | 789 | MALPVTALLLPLALLLHAARPEVQLVESGGGLVQPGGSLRLSCAVSGFALS |
| Full CAR | | NHGMSWVRRAPGKGLEWVSGIVYSGSTYYAASVKGRFTISRDNSRNTLYL |
| | | QMNSLRPEDTAIYYCSAHGGESDVWGQGTTVTVSSASGGGGSGGRASG |
| | | GGGSDIQLTQSPSSLSASVGDRVTITCRASQSISSYLNWYQQKPGKAPKLL |
| | | IYAASSLQSGVPSRFSGSGSGTDFTLTISSLQPEDFATYYCQQSYSTPYTF |
| | | GQGTKVEIKTTTPAPRPPTPAPTIASQPLSLRPEACRPAAGGAVHTRGLDF |
| | | ACDIYIWAPLAGTCGVLLLSLVITLYCKRGRKKLLYIFKQPFMRPVQTTQEE |
| | | DGCSCRFPEEEEGGCELRVKFSRSADAPAYKQGQNQLYNELNLGRREEY |
| | | DVLDKRRGRDPEMGGKPRRKNPQEGLYNELQKDKMAEAYSEIGMKGER |
| | | RRGKGHDGLYQGLSTATKDTYDALHMQALPPR |
| 139109-nt | 790 | ATGGCCCTCCCTGTCACCGCCCTGCTGCTTCCGCTGGCTCTTCTGCTC |
| Full CAR | | CACGCCGCTCGGCCCGAAGTGCAATTGGTGGAATCAGGGGGAGGACT |
| | | TGTGCAGCCTGGAGGATCGCTGAGACTGTCATGTGCCGTGTCCGGCTT |
| | | TGCCCTGTCCAACCACGGGATGTCCTGGGTCCGCCGCGCGCCTGGAA |
| | | AGGGCCTCGAATGGGTGTCGGGTATTGTGTACAGCGGTAGCACCTACT |
| | | ATGCCGCATCCGTGAAGGGGAGATTCACCATCAGCCGGGACAACTCCA |
| | | GGAACACTCTGTACCTCCAAATGAATTCGCTGAGGCCAGAGGACACTG |
| | | CCATCTACTACTGCTCCGCGCATGGCGGAGAGTCCGACGTCTGGGGA |
| | | CAGGGGACCACCGTGACCGTGTCTAGCGCGTCCGGCGGAGGCGGCA |
| | | GCGGGGGTCGGGCATCAGGGGGCGGCGGATCGGACATCCAGCTCAC |
| | | CCAGTCCCCGAGCTCGCTGTCCGCCTCCGTGGGAGATCGGGTCACCA |
| | | TCACGTGCCGCGCCAGCCAGTCGATTTCCTCCTACCTGAACTGGTACC |
| | | AACAGAAGCCCGGAAAAGCCCCGAAGCTTCTCATCTACGCCGCCTCGA |
| | | GCCTGCAGTCAGGAGTGCCCTCACGGTTCTCCGGCTCCGGTTCCGGTA |
| | | CTGATTTCACCCTGACCATTTCCTCCCTGCAACCGGAGGACTTCGCTAC |
| | | TTACTACTGCCAGCAGTCGTACTCCACCCCCTACACTTTCGGACAAGGC |
| | | ACCAAGGTCGAAATCAAGACCACTACCCCAGCACCGAGGCCACCCACC |
| | | CCGGCTCCTACCATCGCCTCCCAGCCTCTGTCCCTGCGTCCGGAGGCA |
| | | TGTAGACCCGCAGCTGGTGGGGCCGTGCATACCCGGGGTCTTGACTT |
| | | CGCCTGCGATATCTACATTTGGGCCCCTCTGGCTGGTACTTGCGGGGT |
| | | CCTGCTGCTTTCACTCGTGATCACTCTTTACTGTAAGCGCGGTCGGAAG |
| | | AAGCTGCTGTACATCTTTAAGCAACCCTTCATGAGGCCTGTGCAGACTA |
| | | CTCAAGAGGAGGACGGCTGTTCATGCCGGTTCCCAGAGGAGGAGGAA |
| | | GGCGGCTGCGAACTGCGCGTGAAATTCAGCCGCAGCGCAGATGCTCC |
| | | AGCCTACAAGCAGGGGCAGAACCAGCTCTACAACGAACTCAATCTTGG |
| | | TCGGAGAGAGGAGTACGACGTGCTGGACAAGCGGAGAGGACGGGACC |
| | | CAGAAATGGGCGGGAAGCCGCGCAGAAAGAATCCCCAAGAGGGCCTG |
| | | TACAACGAGCTCCAAAAGGATAAGATGGCAGAAGCCTATAGCGAGATT |
| | | GGTATGAAAGGGGAACGCAGAAGAGGCAAAGGCCACGACGGACTGTA |
| | | CCAGGGACTCAGCACCGCCACCAAGGACACCTATGACGCTCTTCACAT |
| | | GCAGGCCCTGCCGCCTCGG |

139103

| | | |
|---|---|---|
| 139103-aa | 791 | MALPVTALLLPLALLLHAARPQVQLVESGGGLVQPGRSLRLSCAASGFTFS |
| Full CAR | | NYAMSWVRQAPGKGLGWVSGISRSGENTYYADSVKGRFTISRDNSKNTL |
| | | YLQMNSLRDEDTAVYYCARSPAHYYGGMDVWGQGTTVTVSSASGGGGS |
| | | GGRASGGGGSDIVLTQSPGTLSLSPGERATLSCRASQSISSSFLAWYQQK |
| | | PGQAPRLLIYGASRRATGIPDRFSGSGSGTDFTLTISRLEPEDSAVYYCQQ |
| | | YHSSPSWTFGQGTKLEIKTTTPAPRPPTPAPTIASQPLSLRPEACRPAAGG |
| | | AVHTRGLDFACDIYIWAPLAGTCGVLLLSLVITLYCKRGRKKLLYIFKQPFMR |
| | | PVQTTQEEDGCSCRFPEEEEGGCELRVKFSRSADAPAYKQGQNQLYNEL |
| | | NLGRREEYDVLDKRRGRDPEMGGKPRRKNPQEGLYNELQKDKMAEAYS |
| | | EIGMKGERRRGKGHDGLYQGLSTATKDTYDALHMQALPPR |
| 139103-nt | 792 | ATGGCCCTCCCTGTCACCGCCCTGCTGCTTCCGCTGGCTCTTCTGCTC |
| Full CAR | | CACGCCGCTCGGCCCCAAGTGCAACTCGTGGAATCTGGTGGAGGACT |
| | | CGTGCAACCCGGAAGATCGCTTAGACTGTCGTGTGCCGCCAGCGGGTT |
| | | CACTTTCTCGAACTACGCGATGTCCTGGGTCCGCCAGGCACCCGGAAA |
| | | GGGACTCGGTTGGGTGTCCGGCATTTCCCGGTCCGGCGAAAATACCTA |
| | | CTACGCCGACTCCGTGAAGGGCCGCTTCACCATCTCAAGGGACAACAG |
| | | CAAAAACACCCTGTACTTGCAAATGAACTCCCTGCGGGATGAAGATACA |
| | | GCCGTGTACTATTGCGCCCGGTCGCCTGCCCATTACTACGGCGGAATG |
| | | GACGTCTGGGGACAGGGAACCACTGTGACTGTCAGCAGCGCGTCGGG |
| | | TGGCGGCGGCTCAGGGGGTCGGGCCTCCGGGGGGGGAGGGTCCGAC |
| | | ATCGTGCTGACCCAGTCCCCGGGAACCCTGAGCCTGAGCCCGGGAGA |
| | | GCGCGCGACCCTGTCATGCCGGGCATCCCAGAGCATTAGCTCCTCCTT |
| | | TCTCGCCTGGTATCAGCAGAAGCCCGGACAGGCCCCGAGGCTGCTGA |
| | | TCTACGGCGCTAGCAGAAGGGCTACCGGAATCCCAGACCGGTTCTCCG |
| | | GCTCCGGTTCCGGGACCGATTTCACCCTTACTATCTCGCGCCTGGAAC |
| | | CTGAGGACTCCGCCGTCTACTACTGCCAGCAGTACCACTCATCCCCGT |
| | | CGTGGACGTTCGGACAGGGCACCAAGCTGGAGATTAAGACCACTACCC |
| | | CAGCACCGAGGCCACCCACCCCGGCTCCTACCATCGCCTCCCAGCCT |
| | | CTGTCCCTGCGTCCGGAGGCATGTAGACCCGCAGCTGGTGGGGCCGT |
| | | GCATACCCGGGGTCTTGACTTCGCCTGCGATATCTACATTTGGGCCCC |
| | | TCTGGCTGGTACTTGCGGGGTCCTGCTGCTTTCACTCGTGATCACTCTT |
| | | TACTGTAAGCGCGGTCGGAAGAAGCTGCTGTACATCTTTAAGCAACCCT |
| | | TCATGAGGCCTGTGCAGACTACTCAAGAGGAGGACGGCTGTTCATGCC |
| | | GGTTCCCAGAGGAGGAGGAAGGCGGCTGCGAACTGCGCGTGAAATTC |
| | | AGCCGCAGCGCAGATGCTCCAGCCTACAAGCAGGGGCAGAACCAGCT |
| | | CTACAACGAACTCAATCTTGGTCGGAGAGAGGAGTACGACGTGCTGGA |
| | | CAAGCGGAGAGGACGGGACCCAGAAATGGGCGGGAAGCCGCGCAGA |
| | | AAGAATCCCCAAGAGGGCCTGTACAACGAGCTCCAAAAGGATAAGATG |
| | | GCAGAAGCCTATAGCGAGATTGGTATGAAAGGGGAACGCAGAAGAGG |
| | | CAAAGGCCACGACGGACTGTACCAGGGACTCAGCACCGCCACCAAGG |
| | | ACACCTATGACGCTCTTCACATGCAGGCCCTGCCGCCTCGG |

139105

| | | |
|---|---|---|
| 139105-aa | 793 | MALPVTALLLPLALLLHAARPQVQLVESGGGLVQPGRSLRLSCAASGFTFD |
| Full CAR | | DYAMHWVRQAPGKGLEWVSGISWNSGSIGYADSVKGRFTISRDNAKNSL |
| | | YLQMNSLRAEDTALYYCSVHSFLAYWGQGTLVTVSSASGGGGSGGRASG |
| | | GGGSDIVMTQTPLSLPVTPGEPASISCRSSQSLLHSNGYNYLDWYLQKPG |
| | | QSPQLLIYLGSNRASGVPDRFSGSGSGTDFTLKISRVEAEDVGVYYCMQA |
| | | LQTPYTFGQGTKVEIKTTTPAPRPPTPAPTIASQPLSLRPEACRPAAGGAV |
| | | HTRGLDFACDIYIWAPLAGTCGVLLLSLVITLYCKRGRKKLLYIFKQPFMRPV |
| | | QTTQEEDGCSCRFPEEEEGGCELRVKFSRSADAPAYKQGQNQLYNELNL |
| | | GRREEYDVLDKRRGRDPEMGGKPRRKNPQEGLYNELQKDKMAEAYSEIG |
| | | [sequence omitted] |
| 139105-nt | 794 | ATGGCCCTCCCTGTCACCGCCCTGCTGCTTCCGCTGGCTCTTCTGCTC |
| Full CAR | | CACGCCGCTCGGCCCCAAGTGCAACTCGTCGAATCCGGTGGAGGTCT |
| | | GGTCCAACCTGGTAGAAGCCTGAGACTGTCGTGTGCGGCCAGCGGATT |
| | | CACCTTTGATGACTATGCTATGCACTGGGTGCGGCAGGCCCCAGGAAA |
| | | GGGCCTGGAATGGGTGTCGGGAATTAGCTGGAACTCCGGGTCCATTG |
| | | GCTACGCCGACTCCGTGAAGGGCCGCTTCACCATCTCCCGCGACAAC |
| | | GCAAAGAACTCCCTGTACTTGCAAATGAACTCGCTCAGGGCTGAGGAT |
| | | ACCGCGCTGTACTACTGCTCCGTGCATTCCTTCCTGGCCTACTGGGGA |
| | | CAGGGAACTCTGGTCACCGTGTCGAGCGCCTCCGGCGGCGGGGGCTC |
| | | GGGTGGACGGGCCTCGGGCGGAGGGGGGTCCGACATCGTGATGACC |
| | | CAGACCCCGCTGAGCTTGCCCGTGACTCCCGGAGAGCCTGCATCCATC |
| | | TCCTGCCGGTCATCCCAGTCCCTTCTCCACTCCAACGGATACAACTACC |
| | | TCGACTGGTACCTCCAGAAGCCGGGACAGAGCCCTCAGCTTCTGATCT |
| | | ACCTGGGGTCAAATAGAGCCTCAGGAGTGCCGGATCGGTTCAGCGGAT |
| | | CTGGTTCGGGAACTGATTTCACTCTGAAGATTTCCCGCGTGGAAGCCG |
| | | AGGACGTGGGCGTCTACTACTGTATGCAGGCGCTGCAGACCCCCTATA |
| | | CCTTCGGCCAAGGGACGAAAGTGGAGATCAAGACCACTACCCCAGCAC |
| | | CGAGGCCACCCACCCCGGCTCCTACCATCGCCTCCCAGCCTCTGTCCC |
| | | TGCGTCCGGAGGCATGTAGACCCGCAGCTGGTGGGGCCGTGCATACC |
| | | CGGGGTCTTGACTTCGCCTGCGATATCTACATTTGGGCCCCTCTGGCT |
| | | GGTACTTGCGGGGTCCTGCTGCTTTCACTCGTGATCACTCTTTACTGTA |
| | | AGCGCGGTCGGAAGAAGCTGCTGTACATCTTTAAGCAACCCTTCATGA |
| | | GGCCTGTGCAGACTACTCAAGAGGAGGACGGCTGTTCATGCCGGTTCC |
| | | CAGAGGAGGAGGAAGGCGGCTGCGAACTGCGCGTGAAATTCAGCCGC |
| | | AGCGCAGATGCTCCAGCCTACAAGCAGGGGCAGAACCAGCTCTACAAC |
| | | GAACTCAATCTTGGTCGGAGAGAGGAGTACGACGTGCTGGACAAGCG |
| | | GAGAGGACGGGACCCAGAAATGGGCGGGAAGCCGCGCAGAAAGAATC |
| | | CCCAAGAGGGCCTGTACAACGAGCTCCAAAAGGATAAGATGGCAGAAG |
| | | CCTATAGCGAGATTGGTATGAAAGGGGAACGCAGAAGAGGCAAAGGCC |
| | | ACGACGGACTGTACCAGGGACTCAGCACCGCCACCAAGGACACCTATG |
| | | ACGCTCTTCACATGCAGGCCCTGCCGCCTCGG |

139111

| | | |
|---|---|---|
| 139111-aa | 795 | MALPVTALLLPLALLLHAARPEVQLLESGGGLVQPGGSLRLSCAVSGFALS |
| Full CAR | | NHGMSWVRRAPGKGLEWVSGIVYSGSTYYAASVKGRFTISRDNSRNTLYL |
| | | QMNSLRPEDTAIYYCSAHGGESDVWGQGTTVTVSSASGGGGSGGRASG |
| | | GGGSDIVMTQTPLSLSVTPGQPASISCKSSQSLLRNDGKTPLYWYLQKAG |
| | | QPPQLLIYEVSNRFSGVPDRFSGSGSGTDFTLKISRVEAEDVGAYYCMQNI |
| | | QFPSFGGGTKLEIKTTTPAPRPPTPAPTIASQPLSLRPEACRPAAGGAVHT |
| | | RGLDFACDIYIWAPLAGTCGVLLLSLVITLYCKRGRKKLLYIFKQPFMRPVQ |
| | | TTQEEDGCSCRFPEEEEGGCELRVKFSRSADAPAYKQGQNQLYNELNLG |
| | | RREEYDVLDKRRGRDPEMGGKPRRKNPQEGLYNELQKDKMAEAYSEIGM |
| | | KGERRRGKGHDGLYQGLSTATKDTYDALHMQALPPR |
| 139111-nt | 796 | ATGGCCCTCCCTGTCACCGCCCTGCTGCTTCCGCTGGCTCTTCTGCTC |
| Full CAR | | CACGCCGCTCGGCCCGAAGTGCAATTGTTGGAATCTGGAGGAGGACTT |
| | | GTGCAGCCTGGAGGATCACTGAGACTTTCGTGTGCGGTGTCAGGCTTC |
| | | GCCCTGAGCAACCACGGCATGAGCTGGGTGCGGAGAGCCCCGGGGAA |
| | | GGGTCTGGAATGGGTGTCCGGGATCGTCTACTCCGGTTCAACTTACTA |
| | | CGCCGCAAGCGTGAAGGGTCGCTTCACCATTTCCCGCGATAACTCCCG |
| | | GAACACCCTGTACCTCCAAATGAACTCCCTGCGGCCCGAGGACACCGC |
| | | CATCTACTACTGTTCCGCGCATGGAGGAGAGTCCGATGTCTGGGGACA |
| | | GGGCACTACCGTGACCGTGTCGAGCGCCTCGGGGGGAGGAGGCTCC |
| | | GGCGGTCGCGCCTCCGGGGGGGGTGGCAGCGACATTGTGATGACGC |
| | | AGACTCCACTCTCGCTGTCCGTGACCCCGGGACAGCCCGCGTCCATCT |
| | | CGTGCAAGAGCTCCCAGAGCCTGCTGAGGAACGACGGAAAGACTCCT |
| | | CTGTATTGGTACCTCCAGAAGGCTGGACAGCCCCCGCAACTGCTCATC |
| | | TACGAAGTGTCAAATCGCTTCTCCGGGGTGCCGGATCGGTTTTCCGGC |
| | | TCGGGATCGGGCACCGACTTCACCCTGAAAATCTCCAGGGTCGAGGCC |
| | | GAGGACGTGGGAGCCTACTACTGCATGCAAAACATCCAGTTCCCTTCC |
| | | TTCGGCGGCGGCACAAAGCTGGAGATTAAGACCACTACCCCAGCACCG |
| | | AGGCCACCCACCCCGGCTCCTACCATCGCCTCCCAGCCTCTGTCCCTG |
| | | CGTCCGGAGGCATGTAGACCCGCAGCTGGTGGGGCCGTGCATACCCG |
| | | GGGTCTTGACTTCGCCTGCGATATCTACATTTGGGCCCCTCTGGCTGG |
| | | TACTTGCGGGGTCCTGCTGCTTTCACTCGTGATCACTCTTTACTGTAAG |
| | | CGCGGTCGGAAGAAGCTGCTGTACATCTTTAAGCAACCCTTCATGAGG |
| | | CCTGTGCAGACTACTCAAGAGGAGGACGGCTGTTCATGCCGGTTCCCA |
| | | GAGGAGGAGGAAGGCGGCTGCGAACTGCGCGTGAAATTCAGCCGCAG |
| | | CGCAGATGCTCCAGCCTACAAGCAGGGGCAGAACCAGCTCTACAACGA |
| | | ACTCAATCTTGGTCGGAGAGAGGAGTACGACGTGCTGGACAAGCGGA |
| | | GAGGACGGGACCCAGAAATGGGCGGGAAGCCGCGCAGAAAGAATCCC |
| | | CAAGAGGGCCTGTACAACGAGCTCCAAAAGGATAAGATGGCAGAAGCC |
| | | TATAGCGAGATTGGTATGAAAGGGGAACGCAGAAGAGGCAAAGGCCAC |
| | | GACGGACTGTACCAGGGACTCAGCACCGCCACCAAGGACACCTATGAC |
| | | GCTCTTCACATGCAGGCCCTGCCGCCTCGG |

139100

| | | |
|---|---|---|
| 139100-aa | 797 | MALPVTALLLPLALLLHAARPQVQLVQSGAEVRKTGASVKVSCKASGYIFD |
| Full CAR | | NFGINWVRQAPGQGLEWMGWINPKNNNTNYAQKFQGRVTITADESTNTA |
| | | YMEVSSLRSEDTAVYYCARGPYYYQSYMDVWGQGTMVTVSSASGGGGS |
| | | GGRASGGGGSDIVMTQTPLSLPVTPGEPASISCRSSQSLLHSNGYNYLNW |
| | | YLQKPGQSPQLLIYLGSKRASGVPDRFSGSGSGTDFTLHITRVGAEDVGVY |
| | | YCMQALQTPYTFGQGTKLEIKTTTPAPRPPTPAPTIASQPLSLRPEACRPA |
| | | AGGAVHTRGLDFACDIYIWAPLAGTCGVLLLSLVITLYCKRGRKKLLYIFKQ |
| | | PFMRPVQTTQEEDGCSCRFPEEEEGGCELRVKFSRSADAPAYKQGQNQL |
| | | YNELNLGRREEYDVLDKRRGRDPEMGGKPRRKNPQEGLYNELQKDKMA |
| | | EAYSEIGMKGERRRGKGHDGLYQGLSTATKDTYDALHMQALPPR |
| 139100-nt | 798 | ATGGCCCTCCCTGTCACCGCCCTGCTGCTTCCGCTGGCTCTTCTGCTC |
| Full CAR | | CACGCCGCTCGGCCCCAAGTCCAACTCGTCCAGTCCGGCGCAGAAGT |
| | | CAGAAAAACCGGTGCTAGCGTGAAAGTGTCCTGCAAGGCCTCCGGCTA |
| | | CATTTTCGATAACTTCGGAATCAACTGGGTCAGACAGGCCCCGGGCCA |
| | | GGGGCTGGAATGGATGGGATGGATCAACCCCAAGAACAACAACACCAA |
| | | CTACGCACAGAAGTTCCAGGGCCGCGTGACTATCACCGCCGATGAATC |
| | | GACCAATACCGCCTACATGGAGGTGTCCTCCCTGCGGTCGGAGGACAC |
| | | TGCCGTGTATTACTGCGCGAGGGGCCCATACTACTACCAAAGCTACAT |
| | | GGACGTCTGGGGACAGGGAACCATGGTGACCGTGTCATCCGCCTCCG |
| | | GTGGTGGAGGCTCCGGGGGGCGGGCTTCAGGAGGCGGAGGAAGCGA |
| | | TATTGTGATGACCCAGACTCCGCTTAGCCTGCCCGTGACTCCTGGAGA |
| | | ACCGGCCTCCATTTCCTGCCGGTCCTCGCAATCACTCCTGCATTCCAAC |
| | | GGTTACAACTACCTGAATTGGTACCTCCAGAAGCCTGGCCAGTCGCCC |
| | | CAGTTGCTGATCTATCTGGGCTCGAAGCGCGCCTCCGGGGTGCCTGAC |
| | | CGGTTTAGCGGATCTGGGAGCGGCACGGACTTCACTCTCCACATCACC |
| | | CGCGTGGGAGCGGAGGACGTGGGAGTGTACTACTGTATGCAGGCGCT |
| | | GCAGACTCCGTACACATTCGGACAGGGCACCAAGCTGGAGATCAAGAC |
| | | CACTACCCCAGCACCGAGGCCACCCACCCCGGCTCCTACCATCGCCTC |
| | | CCAGCCTCTGTCCCTGCGTCCGGAGGCATGTAGACCCGCAGCTGGTG |
| | | GGGCCGTGCATACCCGGGGTCTTGACTTCGCCTGCGATATCTACATTT |
| | | GGGCCCCTCTGGCTGGTACTTGCGGGGTCCTGCTGCTTTCACTCGTGA |
| | | TCACTCTTTACTGTAAGCGCGGTCGGAAGAAGCTGCTGTACATCTTTAA |
| | | GCAACCCTTCATGAGGCCTGTGCAGACTACTCAAGAGGAGGACGGCTG |
| | | TTCATGCCGGTTCCCAGAGGAGGAGGAAGGCGGCTGCGAACTGCGCG |
| | | TGAAATTCAGCCGCAGCGCAGATGCTCCAGCCTACAAGCAGGGGCAGA |
| | | ACCAGCTCTACAACGAACTCAATCTTGGTCGGAGAGAGGAGTACGACG |
| | | TGCTGGACAAGCGGAGAGGACGGGACCCAGAAATGGGCGGGAAGCC |
| | | GCGCAGAAAGAATCCCCAAGAGGGCCTGTACAACGAGCTCCAAAAGGA |
| | | TAAGATGGCAGAAGCCTATAGCGAGATTGGTATGAAAGGGGAACGCAG |
| | | AAGAGGCAAAGGCCACGACGGACTGTACCAGGGACTCAGCACCGCCA |
| | | CCAAGGACACCTATGACGCTCTTCACATGCAGGCCCTGCCGCCTCGG |

139101

| | | |
|---|---|---|
| 139101-aa | 799 | MALPVTALLLPLALLLHAARPQVQLQESGGGLVQPGGSLRLSCAASGFTFS |
| Full CAR | | SDAMTWVRQAPGKGLEWVSVISGSGGTTYYADSVKGRFTISRDNSKNTLY |
| | | LQMNSLRAEDTAVYYCAKLDSSGYYYARGPRYWGQGTLVTVSSASGGGG |
| | | SGGRASGGGGSDIQLTQSPSSLSASVGDRVTITCRASQSISSYLNWYQQK |
| | | PGKAPKLLIYGASTLASGVPARFSGSGSGTHFTLTINSLQSEDSATYYCQQ |
| | | SYKRASFGQGTKVEIKTTTPAPRPPTPAPTIASQPLSLRPEACRPAAGGAV |
| | | HTRGLDFACDIYIWAPLAGTCGVLLLSLVITLYCKRGRKKLLYIFKQPFMRPV |
| | | QTTQEEDGCSCRFPEEEEGGCELRVKFSRSADAPAYKQGQNQLYNELNL |
| | | GRREEYDVLDKRRGRDPEMGGKPRRKNPQEGLYNELQKDKMAEAYSEIG |
| | | [sequence omitted] |
| 139101-nt | 800 | ATGGCCCTCCCTGTCACCGCCCTGCTGCTTCCGCTGGCTCTTCTGCTC |
| Full CAR | | CACGCCGCTCGGCCCCAAGTGCAACTTCAAGAATCAGGCGGAGGACT |
| | | CGTGCAGCCCGGAGGATCATTGCGGCTCTCGTGCGCCGCCTCGGGCT |
| | | TCACCTTCTCGAGCGACGCCATGACCTGGGTCCGCCAGGCCCCGGGG |
| | | AAGGGGCTGGAATGGGTGTCTGTGATTTCCGGCTCCGGGGGAACTAC |
| | | GTACTACGCCGATTCCGTGAAAGGTCGCTTCACTATCTCCCGGGACAA |
| | | CAGCAAGAACACCCTTTATCTGCAAATGAATTCCCTCCGCGCCGAGGA |
| | | CACCGCCGTGTACTACTGCGCCAAGCTGGACTCCTCGGGCTACTACTA |
| | | TGCCCGGGGTCCGAGATACTGGGGACAGGGAACCCTCGTGACCGTGT |
| | | CCTCCGCGTCCGGCGGAGGAGGGTCGGGAGGGCGGGCCTCCGGCGG |
| | | CGGCGGTTCGGACATCCAGCTGACCCAGTCCCCATCCTCACTGAGCGC |
| | | AAGCGTGGGCGACAGAGTCACCATTACATGCAGGGCGTCCCAGAGCAT |
| | | CAGCTCCTACCTGAACTGGTACCAACAGAAGCCTGGAAAGGCTCCTAA |
| | | GCTGTTGATCTACGGGGCTTCGACCCTGGCATCCGGGGTGCCCGCGA |
| | | GGTTTAGCGGAAGCGGTAGCGGCACTCACTTCACTCTGACCATTAACA |
| | | GCCTCCAGTCCGAGGATTCAGCCACTTACTACTGTCAGCAGTCCTACAA |
| | | GCGGGCCAGCTTCGGACAGGGCACTAAGGTCGAGATCAAGACCACTA |
| | | CCCCAGCACCGAGGCCACCCACCCCGGCTCCTACCATCGCCTCCCAG |
| | | CCTCTGTCCCTGCGTCCGGAGGCATGTAGACCCGCAGCTGGTGGGGC |
| | | CGTGCATACCCGGGGTCTTGACTTCGCCTGCGATATCTACATTTGGGC |
| | | CCCTCTGGCTGGTACTTGCGGGGTCCTGCTGCTTTCACTCGTGATCAC |
| | | TCTTTACTGTAAGCGCGGTCGGAAGAAGCTGCTGTACATCTTTAAGCAA |
| | | CCCTTCATGAGGCCTGTGCAGACTACTCAAGAGGAGGACGGCTGTTCA |
| | | TGCCGGTTCCCAGAGGAGGAGGAAGGCGGCTGCGAACTGCGCGTGAA |
| | | ATTCAGCCGCAGCGCAGATGCTCCAGCCTACAAGCAGGGGCAGAACC |
| | | AGCTCTACAACGAACTCAATCTTGGTCGGAGAGAGGAGTACGACGTGC |
| | | TGGACAAGCGGAGAGGACGGGACCCAGAAATGGGCGGGAAGCCGCG |
| | | CAGAAAGAATCCCCAAGAGGGCCTGTACAACGAGCTCCAAAAGGATAA |
| | | GATGGCAGAAGCCTATAGCGAGATTGGTATGAAAGGGGAACGCAGAAG |
| | | AGGCAAAGGCCACGACGGACTGTACCAGGGACTCAGCACCGCCACCA |
| | | AGGACACCTATGACGCTCTTCACATGCAGGCCCTGCCGCCTCGG |

139102

| | | |
|---|---|---|
| 139102-aa | 801 | MALPVTALLLPLALLLHAARPQVQLVQSGAEVKKPGASVKVSCKASGYTFS |
| Full CAR | | NYGITWVRQAPGQGLEWMGWISAYNGNTNYAQKFQGRVTMTRNTSISTA |
| | | YMELSSLRSEDTAVYYCARGPYYYYMDVWGKGTMVTVSSASGGGGSGG |
| | | RASGGGGSEIVMTQSPLSLPVTPGEPASISCRSSQSLLYSNGYNYVDWYL |
| | | QKPGQSPQLLIYLGSNRASGVPDRFSGSGSGTDFKLQISRVEAEDVGIYYC |
| | | MQGRQFPYSFGQGTKVEIKTTTPAPRPPTPAPTIASQPLSLRPEACRPAAG |
| | | GAVHTRGLDFACDIYIWAPLAGTCGVLLLSLVITLYCKRGRKKLLYIFKQPF |
| | | MRPVQTTQEEDGCSCRFPEEEEGGCELRVKFSRSADAPAYKQGQNQLYN |
| | | ELNLGRREEYDVLDKRRGRDPEMGGKPRRKNPQEGLYNELQKDKMAEAY |
| | | SEIGMKGERRRGKGHDGLYQGLSTATKDTYDALHMQALPPR |
| 139102-nt | 802 | ATGGCCCTCCCTGTCACCGCCCTGCTGCTTCCGCTGGCTCTTCTGCTC |
| Full CAR | | CACGCCGCTCGGCCCCAAGTCCAACTGGTCCAGAGCGGTGCAGAAGT |
| | | GAAGAAGCCCGGAGCGAGCGTGAAAGTGTCCTGCAAGGCTTCCGGGT |
| | | ACACCTTCTCCAACTACGGCATCACTTGGGTGCGCCAGGCCCCGGGAC |
| | | AGGGCCTGGAATGGATGGGGTGGATTTCCGCGTACAACGGCAATACGA |
| | | ACTACGCTCAGAAGTTCCAGGGTAGAGTGACCATGACTAGGAACACCT |
| | | CCATTTCCACCGCCTACATGGAACTGTCCTCCCTGCGGAGCGAGGACA |
| | | CCGCCGTGTACTATTGCGCCCGGGGACCATACTACTACTACATGGATG |
| | | TCTGGGGGAAGGGGACTATGGTCACCGTGTCATCCGCCTCGGGAGGC |
| | | GGCGGATCAGGAGGACGCGCCTCTGGTGGTGGAGGATCGGAGATCGT |
| | | GATGACCCAGAGCCCTCTCTCCTTGCCCGTGACTCCTGGGGAGCCCG |
| | | CATCCATTTCATGCCGGAGCTCCCAGTCACTTCTCTACTCCAACGGCTA |
| | | TAACTACGTGGATTGGTACCTCCAAAAGCCGGGCCAGAGCCCGCAGCT |
| | | GCTGATCTACCTGGGCTCGAACAGGGCCAGCGGAGTGCCTGACCGGT |
| | | TCTCCGGGTCGGGAAGCGGGACCGACTTCAAGCTGCAAATCTCGAGA |
| | | GTGGAGGCCGAGGACGTGGGAATCTACTACTGTATGCAGGGCCGCCA |
| | | GTTTCCGTACTCGTTCGGACAGGGCACCAAAGTGGAAATCAAGACCAC |
| | | TACCCCAGCACCGAGGCCACCCACCCCGGCTCCTACCATCGCCTCCCA |
| | | GCCTCTGTCCCTGCGTCCGGAGGCATGTAGACCCGCAGCTGGTGGGG |
| | | CCGTGCATACCCGGGGTCTTGACTTCGCCTGCGATATCTACATTTGGG |
| | | CCCCTCTGGCTGGTACTTGCGGGGTCCTGCTGCTTTCACTCGTGATCA |
| | | CTCTTTACTGTAAGCGCGGTCGGAAGAAGCTGCTGTACATCTTTAAGCA |
| | | ACCCTTCATGAGGCCTGTGCAGACTACTCAAGAGGAGGACGGCTGTTC |
| | | ATGCCGGTTCCCAGAGGAGGAGGAAGGCGGCTGCGAACTGCGCGTGA |
| | | AATTCAGCCGCAGCGCAGATGCTCCAGCCTACAAGCAGGGGCAGAAC |
| | | CAGCTCTACAACGAACTCAATCTTGGTCGGAGAGAGGAGTACGACGTG |
| | | CTGGACAAGCGGAGAGGACGGGACCCAGAAATGGGCGGGAAGCCGC |
| | | GCAGAAAGAATCCCCAAGAGGGCCTGTACAACGAGCTCCAAAAGGATA |
| | | AGATGGCAGAAGCCTATAGCGAGATTGGTATGAAAGGGGAACGCAGAA |
| | | GAGGCAAAGGCCACGACGGACTGTACCAGGGACTCAGCACCGCCACC |
| | | AAGGACACCTATGACGCTCTTCACATGCAGGCCCTGCCGCCTCGG |

139104

| | | |
|---|---|---|
| 139104-aa | 803 | MALPVTALLLPLALLLHAARPEVQLLETGGGLVQPGGSLRLSCAVSGFALS |
| Full CAR | | NHGMSWVRRAPGKGLEWVSGIVYSGSTYYAASVKGRFTISRDNSRNTLYL |
| | | QMNSLRPEDTAIYYCSAHGGESDVWGQGTTVTVSSASGGGGSGGRASG |
| | | GGGSEIVLTQSPATLSVSPGESATLSCRASQSVSSNLAWYQQKPGQAPRL |
| | | LIYGASTRASGIPDRFSGSGSGTDFTLTISSLQAEDVAVYYCQQYGSSLTF |
| | | GGGTKVEIKTTTPAPRPPTPAPTIASQPLSLRPEACRPAAGGAVHTRGLDF |
| | | ACDIYIWAPLAGTCGVLLLSLVITLYCKRGRKKLLYIFKQPFMRPVQTTQEE |
| | | DGCSCRFPEEEEGGCELRVKFSRSADAPAYKQGQNQLYNELNLGRREEY |
| | | DVLDKRRGRDPEMGGKPRRKNPQEGLYNELQKDKMAEAYSEIGMKGER |
| | | RRGKGHDGLYQGLSTATKDTYDALHMQALPPR |
| 139104-nt | 804 | ATGGCCCTCCCTGTCACCGCCCTGCTGCTTCCGCTGGCTCTTCTGCTC |
| Full CAR | | CACGCCGCTCGGCCCGAAGTGCAATTGCTCGAAACTGGAGGAGGTCT |
| | | GGTGCAACCTGGAGGATCACTTCGCCTGTCCTGCGCCGTGTCGGGCTT |
| | | TGCCCTGTCCAACCATGGAATGAGCTGGGTCCGCCGCGCGCCGGGGA |
| | | AGGGCCTCGAATGGGTGTCCGGCATCGTCTACTCCGGCTCCACCTACT |
| | | ACGCCGCGTCCGTGAAGGGCCGGTTCACGATTTCACGGGACAACTCG |
| | | CGGAACACCCTGTACCTCCAAATGAATTCCCTTCGGCCGGAGGATACT |
| | | GCCATCTACTACTGCTCCGCCCACGGTGGCGAATCCGACGTCTGGGG |
| | | CCAGGGAACCACCGTGACCGTGTCCAGCGCGTCCGGGGGAGGAGGAA |
| | | GCGGGGGTAGAGCATCGGGTGGAGGCGGATCAGAGATCGTGCTGACC |
| | | CAGTCCCCCGCCACCTTGAGCGTGTCACCAGGAGAGTCCGCCACCCT |
| | | GTCATGCCGCGCCAGCCAGTCCGTGTCCTCCAACCTGGCTTGGTACCA |
| | | GCAGAAGCCGGGGCAGGCCCCTAGACTCCTGATCTATGGGGCGTCGA |
| | | CCCGGGCATCTGGAATTCCCGATAGGTTCAGCGGATCGGGCTCGGGC |
| | | ACTGACTTCACTCTGACCATCTCCTCGCTGCAAGCCGAGGACGTGGCT |
| | | GTGTACTACTGTCAGCAGTACGGAAGCTCCCTGACTTTCGGTGGCGGG |
| | | ACCAAAGTCGAGATTAAGACCACTACCCCAGCACCGAGGCCACCCACC |
| | | CCGGCTCCTACCATCGCCTCCCAGCCTCTGTCCCTGCGTCCGGAGGCA |
| | | TGTAGACCCGCAGCTGGTGGGGCCGTGCATACCCGGGGTCTTGACTT |
| | | CGCCTGCGATATCTACATTTGGGCCCCTCTGGCTGGTACTTGCGGGGT |
| | | CCTGCTGCTTTCACTCGTGATCACTCTTTACTGTAAGCGCGGTCGGAAG |
| | | AAGCTGCTGTACATCTTTAAGCAACCCTTCATGAGGCCTGTGCAGACTA |
| | | CTCAAGAGGAGGACGGCTGTTCATGCCGGTTCCCAGAGGAGGAGGAA |
| | | GGCGGCTGCGAACTGCGCGTGAAATTCAGCCGCAGCGCAGATGCTCC |
| | | AGCCTACAAGCAGGGGCAGAACCAGCTCTACAACGAACTCAATCTTGG |
| | | TCGGAGAGAGGAGTACGACGTGCTGGACAAGCGGAGAGGACGGGACC |
| | | CAGAAATGGGCGGGAAGCCGCGCAGAAAGAATCCCCAAGAGGGCCTG |
| | | TACAACGAGCTCCAAAAGGATAAGATGGCAGAAGCCTATAGCGAGATT |
| | | GGTATGAAAGGGGAACGCAGAAGAGGCAAAGGCCACGACGGACTGTA |
| | | CCAGGGACTCAGCACCGCCACCAAGGACACCTATGACGCTCTTCACAT |
| | | GCAGGCCCTGCCGCCTCGG |

139106

| | | |
|---|---|---|
| 139106-aa | 805 | MALPVTALLLPLALLLHAARPEVQLVETGGGLVQPGGSLRLSCAVSGFALS |
| Full CAR | | NHGMSWVRRAPGKGLEWVSGIVYSGSTYYAASVKGRFTISRDNSRNTLYL |
| | | QMNSLRPEDTAIYYCSAHGGESDVWGQGTTVTVSSASGGGGSGGRASG |
| | | GGGSEIVMTQSPATLSVSPGERATLSCRASQSVSSKLAWYQQKPGQAPR |
| | | LLMYGASIRATGIPDRFSGSGSGTEFTLTISSLEPEDFAVYYCQQYGSSSW |
| | | TFGQGTKVEIKTTTPAPRPPTPAPTIASQPLSLRPEACRPAAGGAVHTRGL |
| | | DFACDIYIWAPLAGTCGVLLLSLVITLYCKRGRKKLLYIFKQPFMRPVQTTQ |
| | | EEDGCSCRFPEEEEGGCELRVKFSRSADAPAYKQGQNQLYNELNLGRRE |
| | | EYDVLDKRRGRDPEMGGKPRRKNPQEGLYNELQKDKMAEAYSEIGMKGE |
| | | RRRGKGHDGLYQGLSTATKDTYDALHMQALPPR |
| 139106-nt | 806 | ATGGCCCTCCCTGTCACCGCCCTGCTGCTTCCGCTGGCTCTTCTGCTC |
| Full CAR | | CACGCCGCTCGGCCCGAAGTGCAATTGGTGGAAACTGGAGGAGGACT |
| | | TGTGCAACCTGGAGGATCATTGAGACTGAGCTGCGCAGTGTCGGGATT |
| | | CGCCCTGAGCAACCATGGAATGTCCTGGGTCAGAAGGGCCCCTGGAA |
| | | AAGGCCTCGAATGGGTGTCAGGGATCGTGTACTCCGGTTCCACTTACT |
| | | ACGCCGCCTCCGTGAAGGGGCGCTTCACTATCTCACGGGATAACTCCC |
| | | GCAATACCCTGTACCTCCAAATGAACAGCCTGCGGCCGGAGGATACCG |
| | | CCATCTACTACTGTTCCGCCCACGGTGGAGAGTCTGACGTCTGGGGCC |
| | | AGGGAACTACCGTGACCGTGTCCTCCGCGTCCGGCGGTGGAGGGAGC |
| | | GGCGGCCGCGCCAGCGGCGGCGGAGGCTCCGAGATCGTGATGACCC |
| | | AGAGCCCCGCTACTCTGTCGGTGTCGCCCGGAGAAAGGGCGACCCTG |
| | | TCCTGCCGGGCGTCGCAGTCCGTGAGCAGCAAGCTGGCTTGGTACCA |
| | | GCAGAAGCCGGGCCAGGCACCACGCCTGCTTATGTACGGTGCCTCCA |
| | | TTCGGGCCACCGGAATCCCGGACCGGTTCTCGGGGTCGGGGTCCGGT |
| | | ACCGAGTTCACACTGACCATTTCCTCGCTCGAGCCCGAGGACTTTGCC |
| | | GTCTATTACTGCCAGCAGTACGGCTCCTCCTCATGGACGTTCGGCCAG |
| | | GGGACCAAGGTCGAAATCAAGACCACTACCCCAGCACCGAGGCCACC |
| | | CACCCCGGCTCCTACCATCGCCTCCCAGCCTCTGTCCCTGCGTCCGGA |
| | | GGCATGTAGACCCGCAGCTGGTGGGGCCGTGCATACCCGGGGTCTTG |
| | | ACTTCGCCTGCGATATCTACATTTGGGCCCCTCTGGCTGGTACTTGCG |
| | | GGGTCCTGCTGCTTTCACTCGTGATCACTCTTTACTGTAAGCGCGGTCG |
| | | GAAGAAGCTGCTGTACATCTTTAAGCAACCCTTCATGAGGCCTGTGCAG |
| | | ACTACTCAAGAGGAGGACGGCTGTTCATGCCGGTTCCCAGAGGAGGA |
| | | GGAAGGCGGCTGCGAACTGCGCGTGAAATTCAGCCGCAGCGCAGATG |
| | | CTCCAGCCTACAAGCAGGGGCAGAACCAGCTCTACAACGAACTCAATC |
| | | TTGGTCGGAGAGAGGAGTACGACGTGCTGGACAAGCGGAGAGGACGG |
| | | GACCCAGAAATGGGCGGGAAGCCGCGCAGAAAGAATCCCCAAGAGGG |
| | | CCTGTACAACGAGCTCCAAAAGGATAAGATGGCAGAAGCCTATAGCGA |
| | | GATTGGTATGAAAGGGGAACGCAGAAGAGGCAAAGGCCACGACGGAC |
| | | TGTACCAGGGACTCAGCACCGCCACCAAGGACACCTATGACGCTCTTC |
| | | ACATGCAGGCCCTGCCGCCTCGG |

139107

| | | |
|---|---|---|
| 139107-aa | 807 | MALPVTALLLPLALLLHAARPEVQLVETGGGVVQPGGSLRLSCAVSGFALS |
| Full CAR | | NHGMSWVRRAPGKGLEWVSGIVYSGSTYYAASVKGRFTISRDNSRNTLYL |
| | | QMNSLRPEDTAIYYCSAHGGESDVWGQGTTVTVSSASGGGGSGGRASG |
| | | GGGSEIVLTQSPGTLSLSPGERATLSCRASQSVGSTNLAWYQQKPGQAP |
| | | RLLIYDASNRATGIPDRFSGGGSGTDFTLTISRLEPEDFAVYYCQQYGSSP |
| | | PWTFGQGTKVEIKTTTPAPRPPTPAPTIASQPLSLRPEACRPAAGGAVHTR |
| | | GLDFACDIYIWAPLAGTCGVLLLSLVITLYCKRGRKKLLYIFKQPFMRPVQTT |
| | | QEEDGCSCRFPEEEEGGCELRVKFSRSADAPAYKQGQNQLYNELNLGRR |
| | | EEYDVLDKRRGRDPEMGGKPRRKNPQEGLYNELQKDKMAEAYSEIGMKG |
| | | ERRRGKGHDGLYQGLSTATKDTYDALHMQALPPR |
| 139107-nt | 808 | ATGGCCCTCCCTGTCACCGCCCTGCTGCTTCCGCTGGCTCTTCTGCTC |
| Full CAR | | CACGCCGCTCGGCCCGAAGTGCAATTGGTGGAGACTGGAGGAGGAGT |
| | | GGTGCAACCTGGAGGAAGCCTGAGACTGTCATGCGCGGTGTCGGGCT |
| | | TCGCCCTCTCCAACCACGGAATGTCCTGGGTCCGCCGGGCCCCTGGG |
| | | AAAGGACTTGAATGGGTGTCCGGCATCGTGTACTCGGGTTCCACCTAC |
| | | TACGCGGCCTCAGTGAAGGGCCGGTTTACTATTAGCCGCGACAACTCC |
| | | AGAAACACACTGTACCTCCAAATGAACTCGCTGCGGCCGGAAGATACC |
| | | GCTATCTACTACTGCTCCGCCCATGGGGGAGAGTCGGACGTCTGGGG |
| | | ACAGGGCACCACTGTCACTGTGTCCAGCGCTTCCGGCGGTGGTGGAA |
| | | GCGGGGGACGGGCCTCAGGAGGCGGTGGCAGCGAGATTGTGCTGAC |
| | | CCAGTCCCCCGGGACCCTGAGCCTGTCCCCGGGAGAAAGGGCCACCC |
| | | TCTCCTGTCGGGCATCCCAGTCCGTGGGGTCTACTAACCTTGCATGGT |
| | | ACCAGCAGAAGCCCGGCCAGGCCCCTCGCCTGCTGATCTACGACGCG |
| | | TCCAATAGAGCCACCGGCATCCCGGATCGCTTCAGCGGAGGCGGATC |
| | | GGGCACCGACTTCACCCTCACCATTTCAAGGCTGGAACCGGAGGACTT |
| | | CGCCGTGTACTACTGCCAGCAGTATGGTTCGTCCCCACCCTGGACGTT |
| | | CGGCCAGGGGACTAAGGTCGAGATCAAGACCACTACCCCAGCACCGA |
| | | GGCCACCCACCCCGGCTCCTACCATCGCCTCCCAGCCTCTGTCCCTGC |
| | | GTCCGGAGGCATGTAGACCCGCAGCTGGTGGGGCCGTGCATACCCGG |
| | | GGTCTTGACTTCGCCTGCGATATCTACATTTGGGCCCCTCTGGCTGGTA |
| | | CTTGCGGGGTCCTGCTGCTTTCACTCGTGATCACTCTTTACTGTAAGCG |
| | | CGGTCGGAAGAAGCTGCTGTACATCTTTAAGCAACCCTTCATGAGGCC |
| | | TGTGCAGACTACTCAAGAGGAGGACGGCTGTTCATGCCGGTTCCCAGA |
| | | GGAGGAGGAAGGCGGCTGCGAACTGCGCGTGAAATTCAGCCGCAGCG |
| | | CAGATGCTCCAGCCTACAAGCAGGGGCAGAACCAGCTCTACAACGAAC |
| | | TCAATCTTGGTCGGAGAGAGGAGTACGACGTGCTGGACAAGCGGAGA |
| | | GGACGGGACCCAGAAATGGGCGGGAAGCCGCGCAGAAAGAATCCCCA |
| | | AGAGGGCCTGTACAACGAGCTCCAAAAGGATAAGATGGCAGAAGCCTA |
| | | TAGCGAGATTGGTATGAAAGGGGAACGCAGAAGAGGCAAAGGCCACG |
| | | ACGGACTGTACCAGGGACTCAGCACCGCCACCAAGGACACCTATGACG |
| | | CTCTTCACATGCAGGCCCTGCCGCCTCGG |

139108

| | | |
|---|---|---|
| 139108-aa | 809 | MALPVTALLLPLALLLHAARPQVQLVESGGGLVKPGGSLRLSCAASGFTFS |
| Full CAR | | DYYMSWIRQAPGKGLEWVSYISSSGSTIYYADSVKGRFTISRDNAKNSLYL |
| | | QMNSLRAEDTAVYYCARESGDGMDVWGQGTTVTVSSASGGGGSGGRA |
| | | SGGGGSDIQMTQSPSSLSASVGDRVTITCRASQSISSYLNWYQQKPGKAP |
| | | KLLIYAASSLQSGVPSRFSGSGSGTDFTLTISSLQPEDFATYYCQQSYTLAF |
| | | GQGTKVDIKTTTPAPRPPTPAPTIASQPLSLRPEACRPAAGGAVHTRGLDF |
| | | ACDIYIWAPLAGTCGVLLLSLVITLYCKRGRKKLLYIFKQPFMRPVQTTQEE |
| | | DGCSCRFPEEEEGGCELRVKFSRSADAPAYKQGQNQLYNELNLGRREEY |
| | | DVLDKRRGRDPEMGGKPRRKNPQEGLYNELQKDKMAEAYSEIGMKGER |
| | | RRGKGHDGLYQGLSTATKDTYDALHMQALPPR |
| 139108-nt | 810 | ATGGCCCTCCCTGTCACCGCCCTGCTGCTTCCGCTGGCTCTTCTGCTC |
| Full CAR | | CACGCCGCTCGGCCCCAAGTGCAACTCGTGGAATCTGGTGGAGGACT |
| | | CGTGAAACCTGGAGGATCATTGAGACTGTCATGCGCGGCCTCGGGATT |
| | | CACGTTCTCCGATTACTACATGAGCTGGATTCGCCAGGCTCCGGGGAA |
| | | GGGACTGGAATGGGTGTCCTACATTTCCTCATCCGGCTCCACCATCTA |
| | | CTACGCGGACTCCGTGAAGGGGAGATTCACCATTAGCCGCGATAACGC |
| | | CAAGAACAGCCTGTACCTTCAGATGAACTCCCTGCGGGCTGAAGATAC |
| | | TGCCGTCTACTACTGCGCAAGGGAGAGCGGAGATGGGATGGACGTCT |
| | | GGGGACAGGGTACCACTGTGACCGTGTCGTCGGCCTCCGGCGGAGGG |
| | | GGTTCGGGTGGAAGGGCCAGCGGCGGCGGAGGCAGCGACATCCAGA |
| | | TGACCCAGTCCCCCTCATCGCTGTCCGCCTCCGTGGGCGACCGCGTC |
| | | ACCATCACATGCCGGGCCTCACAGTCGATCTCCTCCTACCTCAATTGGT |
| | | ATCAGCAGAAGCCCGGAAAGGCCCCTAAGCTTCTGATCTACGCAGCGT |
| | | CCTCCCTGCAATCCGGGGTCCCATCTCGGTTCTCCGGCTCGGGCAGC |
| | | GGTACCGACTTCACTCTGACCATCTCGAGCCTGCAGCCGGAGGACTTC |
| | | GCCACTTACTACTGTCAGCAAAGCTACACCCTCGCGTTTGGCCAGGGC |
| | | ACCAAAGTGGACATCAAGACCACTACCCCAGCACCGAGGCCACCCACC |
| | | CCGGCTCCTACCATCGCCTCCCAGCCTCTGTCCCTGCGTCCGGAGGCA |
| | | TGTAGACCCGCAGCTGGTGGGGCCGTGCATACCCGGGGTCTTGACTT |
| | | CGCCTGCGATATCTACATTTGGGCCCCTCTGGCTGGTACTTGCGGGGT |
| | | CCTGCTGCTTTCACTCGTGATCACTCTTTACTGTAAGCGCGGTCGGAAG |
| | | AAGCTGCTGTACATCTTTAAGCAACCCTTCATGAGGCCTGTGCAGACTA |
| | | CTCAAGAGGAGGACGGCTGTTCATGCCGGTTCCCAGAGGAGGAGGAA |
| | | GGCGGCTGCGAACTGCGCGTGAAATTCAGCCGCAGCGCAGATGCTCC |
| | | AGCCTACAAGCAGGGGCAGAACCAGCTCTACAACGAACTCAATCTTGG |
| | | TCGGAGAGAGGAGTACGACGTGCTGGACAAGCGGAGAGGACGGGACC |
| | | CAGAAATGGGCGGGAAGCCGCGCAGAAAGAATCCCCAAGAGGGCCTG |
| | | TACAACGAGCTCCAAAAGGATAAGATGGCAGAAGCCTATAGCGAGATT |
| | | GGTATGAAAGGGGAACGCAGAAGAGGCAAAGGCCACGACGGACTGTA |
| | | CCAGGGACTCAGCACCGCCACCAAGGACACCTATGACGCTCTTCACAT |
| | | GCAGGCCCTGCCGCCTCGG |

139110

| | | |
|---|---|---|
| 139110-aa | 811 | MALPVTALLLPLALLLHAARPQVQLVQSGGGLVKPGGSLRLSCAASGFTFS |
| Full CAR | | DYYMSWIRQAPGKGLEWVSYISSSGNTIYYADSVKGRFTISRDNAKNSLYL |
| | | QMNSLRAEDTAVYYCARSTMVREDYWGQGTLVTVSSASGGGGSGGRAS |
| | | GGGGSDIVLTQSPLSLPVTLGQPASISCKSSESLVHNSGKTYLNWFHQRP |
| | | GQSPRRLIYEVSNRDSGVPDRFTGSGSGTDFTLKISRVEAEDVGVYYCMQ |
| | | GTHWPGTFGQGTKLEIKTTTPAPRPPTPAPTIASQPLSLRPEACRPAAGGA |
| | | VHTRGLDFACDIYIWAPLAGTCGVLLLSLVITLYCKRGRKKLLYIFKQPFMRP |
| | | VQTTQEEDGCSCRFPEEEEGGCELRVKFSRSADAPAYKQGQNQLYNELN |
| | | LGRREEYDVLDKRRGRDPEMGGKPRRKNPQEGLYNELQKDKMAEAYSEI |
| | | GMKGERRRGKGHDGLYQGLSTATKDTYDALHMQALPPR |
| 139110-nt | 812 | ATGGCCCTCCCTGTCACCGCCCTGCTGCTTCCGCTGGCTCTTCTGCTC |
| Full CAR | | CACGCCGCTCGGCCCCAAGTGCAACTGGTGCAAAGCGGAGGAGGATT |
| | | GGTCAAACCCGGAGGAAGCCTGAGACTGTCATGCGCGGCCTCTGGATT |
| | | CACCTTCTCCGATTACTACATGTCATGGATCAGACAGGCCCCGGGGAA |
| | | GGGCCTCGAATGGGTGTCCTACATCTCGTCCTCCGGGAACACCATCTA |
| | | CTACGCCGACAGCGTGAAGGGCCGCTTTACCATTTCCCGCGACAACGC |
| | | AAAGAACTCGCTGTACCTTCAGATGAATTCCCTGCGGGCTGAAGATACC |
| | | GCGGTGTACTATTGCGCCCGGTCCACTATGGTCCGGGAGGACTACTGG |
| | | GGACAGGGCACACTCGTGACCGTGTCCAGCGCGAGCGGGGGTGGAG |
| | | GCAGCGGTGGACGCGCCTCCGGCGGCGGCGGTTCAGACATCGTGCTG |
| | | ACTCAGTCGCCCCTGTCGCTGCCGGTCACCCTGGGCCAACCGGCCTC |
| | | AATTAGCTGCAAGTCCTCGGAGAGCCTGGTGCACAACTCAGGAAAGAC |
| | | TTACCTGAACTGGTTCCATCAGCGGCCTGGACAGTCCCCACGGAGGCT |
| | | CATCTATGAAGTGTCCAACAGGGATTCGGGGGTGCCCGACCGCTTCAC |
| | | TGGCTCCGGGTCCGGCACCGACTTCACCTTGAAAATCTCCAGAGTGGA |
| | | AGCCGAGGACGTGGGCGTGTACTACTGTATGCAGGGTACCCACTGGC |
| | | CTGGAACCTTTGGACAAGGAACTAAGCTCGAGATTAAGACCACTACCC |
| | | CAGCACCGAGGCCACCCACCCCGGCTCCTACCATCGCCTCCCAGCCT |
| | | CTGTCCCTGCGTCCGGAGGCATGTAGACCCGCAGCTGGTGGGGCCGT |
| | | GCATACCCGGGGTCTTGACTTCGCCTGCGATATCTACATTTGGGCCCC |
| | | TCTGGCTGGTACTTGCGGGGTCCTGCTGCTTTCACTCGTGATCACTCTT |
| | | TACTGTAAGCGCGGTCGGAAGAAGCTGCTGTACATCTTTAAGCAACCCT |
| | | TCATGAGGCCTGTGCAGACTACTCAAGAGGAGGACGGCTGTTCATGCC |
| | | GGTTCCCAGAGGAGGAGGAAGGCGGCTGCGAACTGCGCGTGAAATTC |
| | | AGCCGCAGCGCAGATGCTCCAGCCTACAAGCAGGGGCAGAACCAGCT |
| | | CTACAACGAACTCAATCTTGGTCGGAGAGAGGAGTACGACGTGCTGGA |
| | | CAAGCGGAGAGGACGGGACCCAGAAATGGGCGGGAAGCCGCGCAGA |
| | | AAGAATCCCCAAGAGGGCCTGTACAACGAGCTCCAAAAGGATAAGATG |
| | | GCAGAAGCCTATAGCGAGATTGGTATGAAAGGGGAACGCAGAAGAGG |
| | | CAAAGGCCACGACGGACTGTACCAGGGACTCAGCACCGCCACCAAGG |
| | | ACACCTATGACGCTCTTCACATGCAGGCCCTGCCGCCTCGG |

139112

| | | |
|---|---|---|
| 139112-aa | 813 | MALPVTALLLPLALLLHAARPQVQLVESGGGLVQPGGSLRLSCAVSGFALS |
| Full CAR | | NHGMSWVRRAPGKGLEWVSGIVYSGSTYYAASVKGRFTISRDNSRNTLYL |
| | | QMNSLRPEDTAIYYCSAHGGESDVWGQGTTVTVSSASGGGGSGGRASG |
| | | GGGSDIRLTQSPSPLSASVGDRVTITCQASEDINKFLNWYHQTPGKAPKLLI |
| | | YDASTLQTGVPSRFSGSGSGTDFTLTINSLQPEDIGTYYCQQYESLPLTFG |
| | | GGTKVEIKTTTPAPRPPTPAPTIASQPLSLRPEACRPAAGGAVHTRGLDFA |
| | | CDIYIWAPLAGTCGVLLLSLVITLYCKRGRKKLLYIFKQPFMRPVQTTQEED |
| | | GCSCRFPEEEEGGCELRVKFSRSADAPAYKQGQNQLYNELNLGRREEYD |
| | | VLDKRRGRDPEMGGKPRRKNPQEGLYNELQKDKMAEAYSEIGMKGERR |
| | | RGKGHDGLYQGLSTATKDTYDALHMQALPPR |
| 139112-nt | 814 | ATGGCCCTCCCTGTCACCGCCCTGCTGCTTCCGCTGGCTCTTCTGCTC |
| Full CAR | | CACGCCGCTCGGCCCCAAGTGCAACTCGTGGAATCTGGTGGAGGACT |
| | | CGTGCAACCCGGTGGAAGCCTTAGGCTGTCGTGCGCCGTCAGCGGGT |
| | | TTGCTCTGAGCAACCATGGAATGTCCTGGGTCCGCCGGGCACCGGGA |
| | | AAAGGGCTGGAATGGGTGTCCGGCATCGTGTACAGCGGGTCAACCTAT |
| | | TACGCCGCGTCCGTGAAGGGCAGATTCACTATCTCAAGAGACAACAGC |
| | | CGGAACACCCTGTACTTGCAAATGAATTCCCTGCGCCCCGAGGACACC |
| | | GCCATCTACTACTGCTCCGCCCACGGAGGAGAGTCGGACGTGTGGGG |
| | | CCAGGGAACGACTGTGACTGTGTCCAGCGCATCAGGAGGGGGTGGTT |
| | | CGGGCGGCCGGGCCTCGGGGGGAGGAGGTTCCGACATTCGGCTGAC |
| | | CCAGTCCCCGTCCCCACTGTCGGCCTCCGTCGGCGACCGCGTGACCA |
| | | TCACTTGTCAGGCGTCCGAGGACATTAACAAGTTCCTGAACTGGTACCA |
| | | CCAGACCCCTGGAAAGGCCCCCAAGCTGCTGATCTACGATGCCTCGAC |
| | | CCTTCAAACTGGAGTGCCTAGCCGGTTCTCCGGGTCCGGCTCCGGCAC |
| | | TGATTTCACTCTGACCATCAACTCATTGCAGCCGGAAGATATCGGGACC |
| | | TACTATTGCCAGCAGTACGAATCCCTCCCGCTCACATTCGGCGGGGGA |
| | | ACCAAGGTCGAGATTAAGACCACTACCCCAGCACCGAGGCCACCCACC |
| | | CCGGCTCCTACCATCGCCTCCCAGCCTCTGTCCCTGCGTCCGGAGGCA |
| | | TGTAGACCCGCAGCTGGTGGGGCCGTGCATACCCGGGGTCTTGACTT |
| | | CGCCTGCGATATCTACATTTGGGCCCCTCTGGCTGGTACTTGCGGGGT |
| | | CCTGCTGCTTTCACTCGTGATCACTCTTTACTGTAAGCGCGGTCGGAAG |
| | | AAGCTGCTGTACATCTTTAAGCAACCCTTCATGAGGCCTGTGCAGACTA |
| | | CTCAAGAGGAGGACGGCTGTTCATGCCGGTTCCCAGAGGAGGAGGAA |
| | | GGCGGCTGCGAACTGCGCGTGAAATTCAGCCGCAGCGCAGATGCTCC |
| | | AGCCTACAAGCAGGGGCAGAACCAGCTCTACAACGAACTCAATCTTGG |
| | | TCGGAGAGAGGAGTACGACGTGCTGGACAAGCGGAGAGGACGGGACC |
| | | CAGAAATGGGCGGGAAGCCGCGCAGAAAGAATCCCCAAGAGGGCCTG |
| | | TACAACGAGCTCCAAAAGGATAAGATGGCAGAAGCCTATAGCGAGATT |
| | | GGTATGAAAGGGGAACGCAGAAGAGGCAAAGGCCACGACGGACTGTA |
| | | CCAGGGACTCAGCACCGCCACCAAGGACACCTATGACGCTCTTCACAT |
| | | GCAGGCCCTGCCGCCTCGG |

139113

| | | |
|---|---|---|
| 139113-aa | 815 | MALPVTALLLPLALLLHAARPEVQLVETGGGLVQPGGSLRLSCAVSGFALS |
| Full CAR | | NHGMSWVRRAPGKGLEWVSGIVYSGSTYYAASVKGRFTISRDNSRNTLYL |
| | | QMNSLRPEDTAIYYCSAHGGESDVWGQGTTVTVSSASGGGGSGGRASG |
| | | GGGSETTLTQSPATLSVSPGERATLSCRASQSVGSNLAWYQQKPGQGPR |
| | | LLIYGASTRATGIPARFSGSGSGTEFTLTISSLQPEDFAVYYCQQYNDWLPV |
| | | TFGQGTKVEIKTTTPAPRPPTPAPTIASQPLSLRPEACRPAAGGAVHTRGL |
| | | DFACDIYIWAPLAGTCGVLLLSLVITLYCKRGRKKLLYIFKQPFMRPVQTTQ |
| | | EEDGCSCRFPEEEEGGCELRVKFSRSADAPAYKQGQNQLYNELNLGRRE |
| | | EYDVLDKRRGRDPEMGGKPRRKNPQEGLYNELQKDKMAEAYSEIGMKGE |
| | | RRRGKGHDGLYQGLSTATKDTYDALHMQALPPR |
| 139113-nt | 816 | ATGGCCCTCCCTGTCACCGCCCTGCTGCTTCCGCTGGCTCTTCTGCTC |
| Full CAR | | CACGCCGCTCGGCCCGAAGTGCAATTGGTGGAAACTGGAGGAGGACT |
| | | TGTGCAACCTGGAGGATCATTGCGGCTCTCATGCGCTGTCTCCGGCTT |
| | | CGCCCTGTCAAATCACGGGATGTCGTGGGTCAGACGGGCCCCGGGAA |
| | | AGGGTCTGGAATGGGTGTCGGGGATTGTGTACAGCGGCTCCACCTACT |
| | | ACGCCGCTTCGGTCAAGGGCCGCTTCACTATTTCACGGGACAACAGCC |
| | | GCAACACCCTCTATCTGCAAATGAACTCTCTCCGCCCGGAGGATACCG |
| | | CCATCTACTACTGCTCCGCACACGGCGGCGAATCCGACGTGTGGGGA |
| | | CAGGGAACCACTGTCACCGTGTCGTCCGCATCCGGTGGCGGAGGATC |
| | | GGGTGGCCGGGCCTCCGGGGGCGGCGGCAGCGAGACTACCCTGACC |
| | | CAGTCCCCTGCCACTCTGTCCGTGAGCCCGGGAGAGAGAGCCACCCT |
| | | TAGCTGCCGGGCCAGCCAGAGCGTGGGCTCCAACCTGGCCTGGTACC |
| | | AGCAGAAGCCAGGACAGGGTCCCAGGCTGCTGATCTACGGAGCCTCC |
| | | ACTCGCGCGACCGGCATCCCCGCGAGGTTCTCCGGGTCGGGTTCCGG |
| | | GACCGAGTTCACCCTGACCATCTCCTCCCTCCAACCGGAGGACTTCGC |
| | | GGTGTACTACTGTCAGCAGTACAACGATTGGCTGCCCGTGACATTTGG |
| | | ACAGGGGACGAAGGTGGAAATCAAAACCACTACCCCAGCACCGAGGC |
| | | CACCCACCCCGGCTCCTACCATCGCCTCCCAGCCTCTGTCCCTGCGTC |
| | | CGGAGGCATGTAGACCCGCAGCTGGTGGGGCCGTGCATACCCGGGGT |
| | | CTTGACTTCGCCTGCGATATCTACATTTGGGCCCCTCTGGCTGGTACTT |
| | | GCGGGGTCCTGCTGCTTTCACTCGTGATCACTCTTTACTGTAAGCGCG |
| | | GTCGGAAGAAGCTGCTGTACATCTTTAAGCAACCCTTCATGAGGCCTGT |
| | | GCAGACTACTCAAGAGGAGGACGGCTGTTCATGCCGGTTCCCAGAGGA |
| | | GGAGGAAGGCGGCTGCGAACTGCGCGTGAAATTCAGCCGCAGCGCAG |
| | | ATGCTCCAGCCTACAAGCAGGGGCAGAACCAGCTCTACAACGAACTCA |
| | | ATCTTGGTCGGAGAGAGGAGTACGACGTGCTGGACAAGCGGAGAGGA |
| | | CGGGACCCAGAAATGGGCGGGAAGCCGCGCAGAAAGAATCCCCAAGA |
| | | GGGCCTGTACAACGAGCTCCAAAAGGATAAGATGGCAGAAGCCTATAG |
| | | CGAGATTGGTATGAAAGGGGAACGCAGAAGAGGCAAAGGCCACGACG |
| | | GACTGTACCAGGGACTCAGCACCGCCACCAAGGACACCTATGACGCTC |
| | | TTCACATGCAGGCCCTGCCGCCTCGG |

139114

| | | |
|---|---|---|
| 139114-aa | 817 | MALPVTALLLPLALLLHAARPEVQLVESGGGLVQPGGSLRLSCAVSGFALS |
| Full CAR | | NHGMSWVRRAPGKGLEWVSGIVYSGSTYYAASVKGRFTISRDNSRNTLYL |
| | | QMNSLRPEDTAIYYCSAHGGESDVWGQGTTVTVSSASGGGGSGGRASG |
| | | GGGSEIVLTQSPGTLSLSPGERATLSCRASQSIGSSSLAWYQQKPGQAPR |
| | | LLMYGASSRASGIPDRFSGSGSGTDFTLTISRLEPEDFAVYYCQQYAGSPP |
| | | FTFGQGTKVEIKTTTPAPRPPTPAPTIASQPLSLRPEACRPAAGGAVHTRG |
| | | LDFACDIYIWAPLAGTCGVLLLSLVITLYCKRGRKKLLYIFKQPFMRPVQTTQ |
| | | EEDGCSCRFPEEEEGGCELRVKFSRSADAPAYKQGQNQLYNELNLGRRE |
| | | EYDVLDKRRGRDPEMGGKPRRKNPQEGLYNELQKDKMAEAYSEIGMKGE |
| | | RRRGKGHDGLYQGLSTATKDTYDALHMQALPPR |
| 139114-nt | 818 | ATGGCCCTCCCTGTCACCGCCCTGCTGCTTCCGCTGGCTCTTCTGCTC |
| Full CAR | | CACGCCGCTCGGCCCGAAGTGCAATTGGTGGAATCTGGTGGAGGACTT |
| | | GTGCAACCTGGAGGATCACTGAGACTGTCATGCGCGGTGTCCGGTTTT |
| | | GCCCTGAGCAATCATGGGATGTCGTGGGTCCGGCGCGCCCCCGGAAA |
| | | GGGTCTGGAATGGGTGTCGGGTATCGTCTACTCCGGGAGCACTTACTA |
| | | CGCCGCGAGCGTGAAGGGCCGCTTCACCATTTCCCGCGATAACTCCC |
| | | GCAACACCCTGTACTTGCAAATGAACTCGCTCCGGCCTGAGGACACTG |
| | | CCATCTACTACTGCTCCGCACACGGAGGAGAATCCGACGTGTGGGGCC |
| | | AGGGAACTACCGTGACCGTCAGCAGCGCCTCCGGCGGCGGGGGCTCA |
| | | GGCGGACGGGCTAGCGGCGGCGGTGGCTCCGAGATCGTGCTGACCC |
| | | AGTCGCCTGGCACTCTCTCGCTGAGCCCCGGGGAAAGGGCAACCCTG |
| | | TCCTGTCGGGCCAGCCAGTCCATTGGATCATCCTCCCTCGCCTGGTAT |
| | | CAGCAGAAACCGGGACAGGCTCCGCGGCTGCTTATGTATGGGGCCAG |
| | | CTCAAGAGCCTCCGGCATTCCCGACCGGTTCTCCGGGTCCGGTTCCG |
| | | GCACCGATTTCACCCTGACTATCTCGAGGCTGGAGCCAGAGGACTTCG |
| | | CCGTGTACTACTGCCAGCAGTACGCGGGGTCCCCGCCGTTCACGTTCG |
| | | GACAGGGAACCAAGGTCGAGATCAAGACCACTACCCCAGCACCGAGG |
| | | CCACCCACCCCGGCTCCTACCATCGCCTCCCAGCCTCTGTCCCTGCGT |
| | | CCGGAGGCATGTAGACCCGCAGCTGGTGGGGCCGTGCATACCCGGGG |
| | | TCTTGACTTCGCCTGCGATATCTACATTTGGGCCCCTCTGGCTGGTACT |
| | | TGCGGGGTCCTGCTGCTTTCACTCGTGATCACTCTTTACTGTAAGCGCG |
| | | GTCGGAAGAAGCTGCTGTACATCTTTAAGCAACCCTTCATGAGGCCTGT |
| | | GCAGACTACTCAAGAGGAGGACGGCTGTTCATGCCGGTTCCCAGAGGA |
| | | GGAGGAAGGCGGCTGCGAACTGCGCGTGAAATTCAGCCGCAGCGCAG |
| | | ATGCTCCAGCCTACAAGCAGGGGCAGAACCAGCTCTACAACGAACTCA |
| | | ATCTTGGTCGGAGAGAGGAGTACGACGTGCTGGACAAGCGGAGAGGA |
| | | CGGGACCCAGAAATGGGCGGGAAGCCGCGCAGAAAGAATCCCCAAGA |
| | | GGGCCTGTACAACGAGCTCCAAAAGGATAAGATGGCAGAAGCCTATAG |
| | | CGAGATTGGTATGAAAGGGGAACGCAGAAGAGGCAAAGGCCACGACG |
| | | GACTGTACCAGGGACTCAGCACCGCCACCAAGGACACCTATGACGCTC |
| | | TTCACATGCAGGCCCTGCCGCCTCGG |

149362

| | | |
|---|---|---|
| 149362-aa | 819 | malpvtalllplalllhaarpqvqlqesgpglvkpsetlsltctvsggsisssyyywgwirqppgkglewigsi |
| Full CAR | | yysgsayynpslksrvtisvdtsknqfslrlssvtaadtavyycarhwqewpdafdiwgqgtmvtvssgg |
| | | ggsggggsggggsettltqspafmsatpgdkviisckasqdiddamnwyqqkpgeaplfiiqsatspvp |
| | | gipprfsgsgfgtdfsltinniesedaayyfclqhdnfpltfgqgtkleiktttpaprpptpaptiasqplslrpea |
| | | crpaaggavhtrgldfacdiyiwaplagtcgvlllslvitlyckrgrkkllyifkqpfmrpvqttqeedgcscrfpe |
| | | eeeggcelrvkfsrsadapaykqgqnqlynelnlgrreeydvldkrrgrdpemggkprrknpqeglynel |
| | | qkdkmaeayseigmkgerrrgkghdglyqglstatkdtydalhmqalppr |
| 149362-nt | 820 | atggccctccctgtcaccgccctgctgcttccgctggctcttctgctccacgccgctcggccccaagtgcag |
| Full CAR | | cttcaggaaagcggaccgggcctggtcaagccatccgaaactctctccctgacttgcactgtgtctggcg |
| | | gttccatctcatcgtcgtactactactggggctggattaggcagccgcccggaaagggactggagtggat |
| | | cggaagcatctactattccggctcggcgtactacaaccctagcctcaagtcgagagtgaccatctccgtg |
| | | gatacctccaagaaccagttttccctgcgcctgagctccgtgaccgccgctgacaccgccgtgtactactg |
| | | tgctcggcattggcaggaatggcccgatgccttcgacatttggggccagggcactatggtcactgtgtcatc |
| | | cgggggtggaggcagcgggggaggagggtccggggggggaggttcagagacaaccttgacccagt |
| | | cacccgcattcatgtccgccactccgggagacaaggtcatcatctcgtgcaaagcgtcccaggatatcga |
| | | cgatgccatgaattggtaccagcagaagcctggcgaagcgccgctgttcattatccaatccgcaacctcg |
| | | cccgtgcctggaatcccaccgcggttcagcggcagcggtttcggaaccgacttttccctgaccattaacaa |
| | | cattgagtccgaggacgccgcctactacttctgcctgcaacacgacaacttccctctcacgttcggccagg |
| | | gaaccaagctggaaatcaagaccactaccccagcaccgaggccacccaccccggctcctaccatcgc |
| | | ctcccagcctctgtccctgcgtccggaggcatgtagacccgcagctggtggggccgtgcatacccggggt |
| | | cttgacttcgcctgcgatatctacatttgggcccctctggctggtacttgcggggtcctgctgctttcactcgtga |
| | | tcactctttactgtaagcgcggtcggaagaagctgctgtacatctttaagcaacccttcatgaggcctgtgca |
| | | gactactcaagaggaggacggctgttcatgccggttcccagaggaggaggaaggcggctgcgaactg |
| | | cgcgtgaaattcagccgcagcgcagatgctccagcctacaagcaggggcagaaccagctctacaacg |
| | | aactcaatcttggtcggagagaggagtacgacgtgctggacaagcggagaggacgggacccagaaa |
| | | tgggcgggaagccgcgcagaaagaatccccaagagggcctgtacaacgagctccaaaaggataag |
| | | atggcagaagcctatagcgagattggtatgaaaggggaacgcagaagaggcaaaggccacgacgg |
| | | actgtaccagggactcagcaccgccaccaaggacacctatgacgctcttcacatgcaggccctgccgcc |
| | | tcgg |

149363

| | | |
|---|---|---|
| 149363-aa | 821 | malpvtalllplalllhaarpqvnlresgpalvkptqtltltctfsgfslrtsgmcvswirqppgkalewlaridwd |
| Full CAR | | edkfystslktrltiskdtsdnqvvlrmtnmdpadtatyycarsgaggtsatafdiwgpgtmvtvssggggs |
| | | ggggsggggsdiqmtqspsslsasvgdrvtitcrasqdiynnlawfqlkpgsaprslmyaanksqsgvp |
| | | srfsgsasgtdifitisslqpedfatyycqhyyrfpysfgqgtkleiktttpaprpptpaptiasqplslrpeacrp |
| | | aaggavhtrgldfacdiyiwaplagtcgvlllslvitlyckrgrkkllyifkqpfmrpvqttqeedgcscrfpeee |
| | | eggcelrvkfsrsadapaykqgqnqlynelnlgrreeydvldkrrgrdpemggkprrknpqeglynelqk |
| | | dkmaeayseigmkgerrrgkghdglyqglstatkdtydalhmqalppr |
| 149363-nt | 822 | atggccctccctgtcaccgccctgctgcttccgctggctcttctgctccacgccgctcggccccaagtcaatc |
| Full CAR | | tgcgcgaatccggccccgccttggtcaagcctacccagaccctcactctgacctgtactttctccggcttctc |
| | | cctgcggacttccgggatgtgcgtgtcctggatcagacagcctccgggaaaggccctggagtggctcgct |
| | | cgcattgactgggatgaggacaagttctactccacctcactcaagaccaggctgaccatcagcaaagat |
| | | acctctgacaaccaagtggtgctccgcatgaccaacatggacccagccgacactgccacttactactgc |
| | | gcgaggagcggagcgggcggaacctccgccaccgccttcgatatttggggcccgggtaccatggtcac |
| | | cgtgtcaagcggaggaggggggtccgggggcggcggttccgggggaggcggatcggacattcagat |
| | | gactcagtcaccatcgtccctgagcgctagcgtgggcgacagagtgacaatcacttgccgggcatccca |
| | | ggacatctataacaaccttgcgtggttccagctgaagcctggttccgcaccgcggtcacttatgtacgccg |
| | | ccaacaagagccagtcgggagtgccgtcccggttttccggttcggcctcgggaactgacttcaccctgac |
| | | gatctccagcctgcaacccgaggatttcgccacctactactgccagcactactaccgctttccctactcgttc |
| | | ggacagggaaccaagctggaaatcaagaccactaccccagcaccgaggccacccaccccggctcct |
| | | accatcgcctcccagcctctgtccctgcgtccggaggcatgtagacccgcagctggtggggccgtgcata |
| | | cccggggtcttgacttcgcctgcgatatctacatttgggcccctctggctggtacttgcggggtcctgctgcttt |
| | | cactcgtgatcactctttactgtaagcgcggtcggaagaagctgctgtacatctttaagcaacccttcatgag |
| | | gcctgtgcagactactcaagaggaggacggctgttcatgccggttcccagaggaggaggaaggcggct |
| | | gcgaactgcgcgtgaaattcagccgcagcgcagatgctccagcctacaagcaggggcagaaccagct |
| | | ctacaacgaactcaatcttggtcggagagaggagtacgacgtgctggacaagcggagaggacgggac |
| | | ccagaaatgggcgggaagccgcgcagaaagaatccccaagagggcctgtacaacgagctccaaaa |
| | | ggataagatggcagaagcctatagcgagattggtatgaaaggggaacgcagaagaggcaaaggcca |
| | | cgacggactgtaccagggactcagcaccgccaccaaggacacctatgacgctcttcacatgcaggccc |
| | | tgccgcctcgg |

149364

| | | |
|---|---|---|
| 149364-aa | 823 | malpvtalllplalllhaarpevqlvesggglvkpggslrlscaasgftfssysmnwvrqapgkglewvssis |
| Full CAR | | ssssyiyyadsvkgrftisrdnaknslylqmnslraedtavyycaktiaavyafdiwgqgttvtvssggggs |
| | | ggggsggggseivltqsplslpvtpeepasiscrssqsllhsngynyldwylqkpgqspqlliylgsnrasg |
| | | vpdrfsgsgsgtdftlkisrveaedvgvyycmqalqtpytfgqgtkleiktttpaprpptpaptiasqplslrpe |
| | | acrpaaggavhtrgldfacdiyiwaplagtcgvlllslvitlyckrgrkkllyifkqpfmrpvqttqeedgcscrfp |
| | | eeeeggcelrvkfsrsadapaykqgqnqlynelnlgrreeydvldkrrgrdpemggkprrknpqeglyn |
| | | elqkdkmaeayseigmkgerrrgkghdglyqglstatkdtydalhmqalppr |
| 149364-nt | 824 | atggccctccctgtcaccgccctgctgcttccgctggctcttctgctccacgccgctcggcccgaagtgcag |
| Full CAR | | cttgtcgaatccggggggggactggtcaagccgggcggatcactgagactgtcctgcgccgcgagcgg |
| | | cttcacgttctcctcctactccatgaactgggtccgccaagcccccgggaagggactggaatgggtgtcct |
| | | ctatctcctcgtcgtcgtcctacatctactacgccgactccgtgaagggaagattcaccatttcccgcgaca |
| | | acgcaaagaactcactgtacttgcaaatgaactcactccgggccgaagatactgctgtgtactattgcgcc |
| | | aagactattgccgccgtctacgctttcgacatctggggccagggaaccaccgtgactgtgtcgtccggtgg |
| | | tggtggctcgggcggaggaggaagcggcggcggggggtccgagattgtgctgacccagtcgccactg |
| | | agcctccctgtgacccccgaggaacccgccagcatcagctgccggtccagccagtccctgctccactcc |
| | | aacggatacaattacctcgattggtaccttcagaagcctggacaaagcccgcagctgctcatctacttggg |
| | | atcaaaccgcgcgtcaggagtgcctgaccggttctccggctcgggcagcggtaccgatttcaccctgaa |
| | | aatctccagggtggaggcagaggacgtgggagtgtattactgtatgcaggcgctgcagactccgtacac |
| | | atttgggcagggcaccaagctggagatcaagaccactaccccagcaccgaggccacccaccccggct |
| | | cctaccatcgcctcccagcctctgtccctgcgtccggaggcatgtagacccgcagctggtggggccgtgc |
| | | atacccggggtcttgacttcgcctgcgatatctacatttgggcccctctggctggtacttgcggggtcctgctg |
| | | ctttcactcgtgatcactctttactgtaagcgcggtcggaagaagctgctgtacatctttaagcaacccttcat |
| | | gaggcctgtgcagactactcaagaggaggacggctgttcatgccggttcccagaggaggaggaaggc |
| | | ggctgcgaactgcgcgtgaaattcagccgcagcgcagatgctccagcctacaagcaggggcagaacc |
| | | agctctacaacgaactcaatcttggtcggagagaggagtacgacgtgctggacaagcggagaggacg |
| | | ggacccagaaatgggcgggaagccgcgcagaaagaatccccaagagggcctgtacaacgagctcc |
| | | aaaaggataagatggcagaagcctatagcgagattggtatgaaaggggaacgcagaagaggcaaa |
| | | ggccacgacggactgtaccagggactcagcaccgccaccaaggacacctatgacgctcttcacatgca |
| | | ggccctgccgcctcgg |

149365

| | | |
|---|---|---|
| 149365-aa | 825 | malpvtalllplalllhaarpevqlvesggglvkpggslrlscaasgftfsdyymswirqapgkglewvsyis |
| Full CAR | | ssgstiyyadsvkgrftisrdnaknslylqmnslraedtavyycardlrgafdiwgqgtmvtvssggggsg |
| | | gggsggggssyvltqspsysaapgytatiscggnnigtksvhwyqqkpgqapllvirddsvrpskipgrfs |
| | | gsnsgnmatltisgvqagdeadfycqvwdsdsehvvfgggtkltvltttpaprpptpaptiasqplslrpea |
| | | crpaaggavhtrgldfacdiyiwaplagtcgvlllslvitlyckrgrkkllyifkqpfmrpvqttqeedgcscrfpe |
| | | eeeggcelrvkfsrsadapaykqgqnqlynelnlgrreeydvldkrrgrdpemggkprrknpqeglynel |
| | | qkdkmaeayseigmkgerrrgkghdglyqglstatkdtydalhmqalppr |
| 149365-nt | 826 | atggccctccctgtcaccgccctgctgcttccgctggctcttctgctccacgccgctcggcccgaagtccag |
| Full CAR | | ctcgtggagtccggcggaggccttgtgaagcctggaggttcgctgagactgtcctgcgccgcctccggctt |
| | | caccttctccgactactacatgtcctggatcagacaggccccgggaaagggcctggaatgggtgtcctac |
| | | atctcgtcatcgggcagcactatctactacgcggactcagtgaaggggcggttcaccatttcccgggataa |
| | | cgcgaagaactcgctgtatctgcaaatgaactcactgagggccgaggacaccgccgtgtactactgcgc |
| | | ccgcgatctccgcggggcatttgacatctggggacagggaaccatggtcacagtgtccagcggagggg |
| | | gaggatcgggtggcggaggttccgggggtggaggctcctcctacgtgctgactcagagcccaagcgtc |
| | | agcgctgcgcccggttacacggcaaccatctcctgtggcggaaacaacattgggaccaagtctgtgcac |
| | | tggtatcagcagaagccgggccaagctcccctgttggtgatccgcgatgactccgtgcggcctagcaaa |
| | | attccgggacggttctccggctccaacagcggcaatatggccactctcaccatctcgggagtgcaggccg |
| | | gagatgaagccgacttctactgccaagtctgggactcagactccgagcatgtggtgttcgggggcggaa |
| | | ccaagctgactgtgctcaccactaccccagcaccgaggccacccaccccggctcctaccatcgcctccc |
| | | agcctctgtccctgcgtccggaggcatgtagacccgcagctggtggggccgtgcatacccggggtcttga |
| | | cttcgcctgcgatatctacatttgggcccctctggctggtacttgcggggtcctgctgctttcactcgtgatcact |
| | | ctttactgtaagcgcggtcggaagaagctgctgtacatctttaagcaacccttcatgaggcctgtgcagact |
| | | actcaagaggaggacggctgttcatgccggttcccagaggaggaggaaggcggctgcgaactgcgcg |
| | | tgaaattcagccgcagcgcagatgctccagcctacaagcaggggcagaaccagctctacaacgaact |
| | | caatcttggtcggagagaggagtacgacgtgctggacaagcggagaggacgggacccagaaatggg |
| | | cgggaagccgcgcagaaagaatccccaagagggcctgtacaacgagctccaaaaggataagatgg |
| | | cagaagcctatagcgagattggtatgaaaggggaacgcagaagaggcaaaggccacgacggactgt |
| | | accagggactcagcaccgccaccaaggacacctatgacgctcttcacatgcaggccctgccgcctcgg |

149366

| | | |
|---|---|---|
| 149366-aa | 827 | malpvtalllplalllhaarpqvqlvqsgaevkkpgasvkvsckpsgytvtshyihwyrrapgqglewmg |
| Full CAR | | minpsggvtaysqtlqgrvtmtsdtssstvymelsslrsedtamyycaregsgsgwyfdfwgrgtivtvss |
| | | ggggsggggsggggssyvltqppsysyspgqtasitcsgdglskkyvswyqqkagqspvvlisrdker |
| | | psgipdrfsgsnsadtatltisgtqamdeadyycqawddttvvfgggtkltvltttpaprpptpaptiasqpls |
| | | lrpeacrpaaggavhtrgldfacdiyiwaplagtcgvlllslvitlyckrgrkkllyifkqpfmrpvqttqeedgcs |
| | | crfpeeeeggcelrvkfsrsadapaykqgqnqlynelnlgrreeydvldkrrgrdpemggkprrknpqeg |
| | | lynelqkdkmaeayseigmkgerrrgkghdglyqglstatkdtydalhmqalppr |
| 149366-nt | 828 | atggccctccctgtcaccgccctgctgcttccgctggctcttctgctccacgccgctcggccccaagtgcag |
| Full CAR | | ctggtgcagagcggggccgaagtcaagaagccgggagcctccgtgaaagtgtcctgcaagccttcgg |
| | | gatacaccgtgacctcccactacattcattgggtccgccgcgcccccggccaaggactcgagtggatgg |
| | | gcatgatcaaccctagcggcggagtgaccgcgtacagccagacgctgcagggacgcgtgactatgac |
| | | ctcggatacctcctcctccaccgtctatatggaactgtccagcctgcggtccgaggataccgccatgtacta |
| | | ctgcgcccgggaaggatcaggctccgggtggtatttcgacttctggggaagaggcaccctcgtgactgtg |
| | | tcatctgggggagggggttccggtggtggcggatcgggaggaggcggttcatcctacgtgctgacccag |
| | | ccaccctccgtgtccgtgagccccggccagactgcatcgattacatgtagcggcgacggcctctccaag |
| | | aaatacgtgtcgtggtaccagcagaaggccggacagagcccggtggtgctgatctcaagagataagga |
| | | gcggcctagcggaatcccggacaggttctcgggttccaactccgcggacactgctactctgaccatctcg |
| | | gggacccaggctatggacgaagccgattactactgccaagcctgggacgacactactgtcgtgtttgga |
| | | gggggcaccaagttgaccgtccttaccactaccccagcaccgaggccacccaccccggctcctaccat |
| | | cgcctcccagcctctgtccctgcgtccggaggcatgtagacccgcagctggtggggccgtgcatacccg |
| | | gggtcttgacttcgcctgcgatatctacatttgggcccctctggctggtacttgcggggtcctgctgctttcactc |
| | | gtgatcactctttactgtaagcgcggtcggaagaagctgctgtacatctttaagcaacccttcatgaggcct |
| | | gtgcagactactcaagaggaggacggctgttcatgccggttcccagaggaggaggaaggcggctgcg |
| | | aactgcgcgtgaaattcagccgcagcgcagatgctccagcctacaagcaggggcagaaccagctcta |
| | | caacgaactcaatcttggtcggagagaggagtacgacgtgctggacaagcggagaggacgggaccc |
| | | agaaatgggcgggaagccgcgcagaaagaatccccaagagggcctgtacaacgagctccaaaagg |
| | | ataagatggcagaagcctatagcgagattggtatgaaaggggaacgcagaagaggcaaaggccacg |
| | | acggactgtaccagggactcagcaccgccaccaaggacacctatgacgctcttcacatgcaggccctg |
| | | ccgcctcgg |

149367

| | | |
|---|---|---|
| 149367-aa | 829 | malpvtalllplalllhaarpqvqlqesgpglvkpsqtlsltctvsggsissggyywswirqhpgkglewigyi |
| Full CAR | | yysgstyynpslksrvtisvdtsknqfslklssvtaadtavyycaragiaarlrgafdiwgqgtmvtvssggg |
| | | gsggggsggggsdivmtqspssysasvgdrviitcrasqgirnwlawyqqkpgkapnlliyaasnlqsg |
| | | vpsrfsgsgsgadftltisslqpedvatyycqkynsapftfgpgtkvdiktttpaprpptpaptiasqplslrpe |
| | | acrpaaggavhtrgldfacdiyiwaplagtcgvlllslvitlyckrgrkkllyifkqpfmrpvqttqeedgcscrfp |
| | | eeeeggcelrvkfsrsadapaykqgqnqlynelnlgrreeydvldkrrgrdpemggkprrknpqeglyn |
| | | elqkdkmaeayseigmkgerrrgkghdglyqglstatkdtydalhmqalppr |
| 149367-nt | 830 | atggccctccctgtcaccgccctgctgcttccgctggctcttctgctccacgccgctcggccccaagtgcag |
| Full CAR | | cttcaggagagcggcccgggactcgtgaagccgtcccagaccctgtccctgacttgcaccgtgtcggga |
| | | ggaagcatctcgagcggaggctactattggtcgtggattcggcagcaccctggaaagggcctggaatgg |
| | | atcggctacatctactactccggctcgacctactacaacccatcgctgaagtccagagtgacaatctcagt |
| | | ggacacgtccaagaatcagttcagcctgaagctctcttccgtgactgcggccgacaccgccgtgtactact |
| | | gcgcacgcgctggaattgccgcccggctgaggggtgccttcgacatttggggacagggcaccatggtca |
| | | ccgtgtcctccggcggcggaggttccgggggtggaggctcaggaggaggggggtccgacatcgtcatg |
| | | actcagtcgccctcaagcgtcagcgcgtccgtcggggacagagtgatcatcacctgtcgggcgtcccag |
| | | ggaattcgcaactggctggcctggtatcagcagaagcccggaaaggcccccaacctgttgatctacgcc |
| | | gcctcaaacctccaatccggggtgccgagccgcttcagcggctccggttcgggtgccgatttcactctgac |
| | | catctcctccctgcaacctgaagatgtggctacctactactgccaaaagtacaactccgcaccttttactttc |
| | | ggaccggggaccaaagtggacattaagaccactaccccagcaccgaggccacccaccccggctcct |
| | | accatcgcctcccagcctctgtccctgcgtccggaggcatgtagacccgcagctggtggggccgtgcata |
| | | cccggggtcttgacttcgcctgcgatatctacatttgggcccctctggctggtacttgcggggtcctgctgcttt |
| | | cactcgtgatcactctttactgtaagcgcggtcggaagaagctgctgtacatctttaagcaacccttcatgag |
| | | gcctgtgcagactactcaagaggaggacggctgttcatgccggttcccagaggaggaggaaggcggct |
| | | gcgaactgcgcgtgaaattcagccgcagcgcagatgctccagcctacaagcaggggcagaaccagct |
| | | ctacaacgaactcaatcttggtcggagagaggagtacgacgtgctggacaagcggagaggacgggac |
| | | ccagaaatgggcgggaagccgcgcagaaagaatccccaagagggcctgtacaacgagctccaaaa |
| | | ggataagatggcagaagcctatagcgagattggtatgaaaggggaacgcagaagaggcaaaggcca |
| | | cgacggactgtaccagggactcagcaccgccaccaaggacacctatgacgctcttcacatgcaggccc |
| | | tgccgcctcgg |

149368

| | | |
|---|---|---|
| 149368-aa | 831 | malpvtalllplalllhaarpqvqlvqsgaevkkpgssvkvsckasggtfssyaiswvrqapgqglewmg |
| Full CAR | | giipifgtanyaqkfqgrvtitadeststaymelsslrsedtavyycarrggyqllrwdvgllrsafdiwgqgtm |
| | | vtvssggggsggggsggggssyvltqppsysvapgqtaritcggnnigsksvhwyqqkpgqapvlvly |
| | | gknnrpsgvpdrfsgsrsgttasltitgaqaedeadyycssrdssgdhlrvfgtgtkvtvltttpaprpptpap |
| | | tiasqplslrpeacrpaaggavhtrgldfacdiyiwaplagtcgvlllslvitlyckrgrkkllyifkqpfmrpvqtt |
| | | qeedgcscrfpeeeeggcelrvkfsrsadapaykqgqnqlynelnlgrreeydvldkrrgrdpemggkp |
| | | rrknpqeglynelqkdkmaeayseigmkgerrrgkghdglyqglstatkdtydalhmqalppr |
| 149368-nt | 832 | atggccctccctgtcaccgccctgctgcttccgctggctcttctgctccacgccgctcggccccaagtgcag |
| Full CAR | | ctggtccagtcgggcgccgaggtcaagaagcccgggagctctgtgaaagtgtcctgcaaggcctccgg |
| | | gggcacctttagctcctacgccatctcctgggtccgccaagcaccgggtcaaggcctggagtggatggg |
| | | gggaattatccctatcttcggcactgccaactacgcccagaagttccagggacgcgtgaccattaccgcg |
| | | gacgaatccacctccaccgcttatatggagctgtccagcttgcgctcggaagataccgccgtgtactactg |
| | | cgcccggaggggtggataccagctgctgagatgggacgtgggcctcctgcggtcggcgttcgacatctg |
| | | gggccagggcactatggtcactgtgtccagcggaggaggcggatcgggaggcggcggatcaggggg |
| | | aggcggttccagctacgtgcttactcaacccccttcggtgtccgtggccccgggacagaccgccagaatc |
| | | acttgcggaggaaacaacattgggtccaagagcgtgcattggtaccagcagaagccaggacaggccc |
| | | ctgtgctggtgctctacgggaagaacaatcggcccagcggagtgccggacaggttctcgggttcacgctc |
| | | cggtacaaccgcttcactgactatcaccggggcccaggcagaggatgaagcggactactactgttcctc |
| | | ccgggattcatccggcgaccacctccgggtgttcggaaccggaacgaaggtcaccgtgctgaccactac |
| | | cccagcaccgaggccacccaccccggctcctaccatcgcctcccagcctctgtccctgcgtccggaggc |
| | | atgtagacccgcagctggtggggccgtgcatacccggggtcttgacttcgcctgcgatatctacatttgggc |
| | | ccctctggctggtacttgcggggtcctgctgctttcactcgtgatcactctttactgtaagcgcggtcggaaga |
| | | agctgctgtacatctttaagcaacccttcatgaggcctgtgcagactactcaagaggaggacggctgttca |
| | | tgccggttcccagaggaggaggaaggcggctgcgaactgcgcgtgaaattcagccgcagcgcagatg |
| | | ctccagcctacaagcaggggcagaaccagctctacaacgaactcaatcttggtcggagagaggagtac |
| | | gacgtgctggacaagcggagaggacgggacccagaaatgggcgggaagccgcgcagaaagaatc |
| | | cccaagagggcctgtacaacgagctccaaaaggataagatggcagaagcctatagcgagattggtatg |
| | | aaaggggaacgcagaagaggcaaaggccacgacggactgtaccagggactcagcaccgccacca |
| | | aggacacctatgacgctcttcacatgcaggccctgccgcctcgg |

149369

| | | |
|---|---|---|
| 149369-aa | 833 | malpvtalllplalllhaarpevqlqqsgpglvkpsqtisltcaisgdsvssnsaawnwirqspsrglewlgrt |
| Full CAR | | yyrskwysfyaislksriiinpdtsknqfslqlksvtpedtavyycarsspeglflywfdpwgqgtivtvssgg |
| | | dgsggggsggggssseltqdpaysvalgqtiritcqgdslgnyyatwyqqkpgqapvlviygtnnrpsgi |
| | | pdrfsasssgntasltitgaqaedeadyycnsrdssghhllfgtgtkvtvltttpaprpptpaptiasqplslrp |
| | | eacrpaaggavhtrgldfacdiyiwaplagtcgvlllslvitlyckrgrkkllyifkqpfmrpvqttqeedgcscrf |
| | | peeeeggcelrvkfsrsadapaykqgqnqlynelnlgrreeydvldkrrgrdpemggkprrknpqegly |
| | | nelqkdkmaeayseigmkgerrrgkghdglyqglstatkdtydalhmqalppr |
| 149369-nt | 834 | atggccctccctgtcaccgccctgctgcttccgctggctcttctgctccacgccgctcggcccgaagtgcag |
| Full CAR | | ctccaacagtcaggaccggggctcgtgaagccatcccagaccctgtccctgacttgtgccatctcgggag |
| | | atagcgtgtcatcgaactccgccgcctggaactggattcggcagagcccgtcccgcggactggagtggc |
| | | ttggaaggacctactaccggtccaagtggtactctttctacgcgatctcgctgaagtcccgcattatcattaa |
| | | ccctgatacctccaagaatcagttctccctccaactgaaatccgtcacccccgaggacacagcagtgtatt |
| | | actgcgcacggagcagccccgaaggactgttcctgtattggtttgacccctggggccaggggactcttgtg |
| | | accgtgtcgagcggcggagatgggtccggtggcggtggttcggggggcggcggatcatcatccgaact |
| | | gacccaggacccggctgtgtccgtggcgctgggacaaaccatccgcattacgtgccagggagactccct |
| | | gggcaactactacgccacttggtaccagcagaagccgggccaagcccctgtgttggtcatctacgggac |
| | | caacaacagaccttccggcatccccgaccggttcagcgcttcgtcctccggcaacactgccagcctgac |
| | | catcactggagcgcaggccgaagatgaggccgactactactgcaacagcagagactcctcgggtcatc |
| | | acctcttgttcggaactggaaccaaggtcaccgtgctgaccactaccccagcaccgaggccacccaccc |
| | | cggctcctaccatcgcctcccagcctctgtccctgcgtccggaggcatgtagacccgcagctggtggggc |
| | | cgtgcatacccggggtcttgacttcgcctgcgatatctacatttgggcccctctggctggtacttgcggggtcc |
| | | tgctgctttcactcgtgatcactctttactgtaagcgcggtcggaagaagctgctgtacatctttaagcaaccc |
| | | ttcatgaggcctgtgcagactactcaagaggaggacggctgttcatgccggttcccagaggaggaggaa |
| | | ggcggctgcgaactgcgcgtgaaattcagccgcagcgcagatgctccagcctacaagcaggggcaga |
| | | accagctctacaacgaactcaatcttggtcggagagaggagtacgacgtgctggacaagcggagagg |
| | | acgggacccagaaatgggcgggaagccgcgcagaaagaatccccaagagggcctgtacaacgag |
| | | ctccaaaaggataagatggcagaagcctatagcgagattggtatgaaaggggaacgcagaagaggc |
| | | aaaggccacgacggactgtaccagggactcagcaccgccaccaaggacacctatgacgctcttcacat |
| | | gcaggccctgccgcctcgg |

BCMA_EBB-C1978-A4

| | | |
|---|---|---|
| BCMA_EBB- | 835 | MALPVTALLLPLALLLHAARPEVQLVESGGGLVQPGGSLRLSCAASGFTFS |
| C1978-A4-aa | | SYAMSWVRQAPGKGLEWVSAISGSGGSTYYADSVKGRFTISRDNSKNTLY |
| Full CART | | LQMNSLRAEDTAVYYCAKVEGSGSLDYWGQGTLVTVSSGGGGSGGGGS |
| | | GGGGSEIVMTQSPGTLSLSPGERATLSCRASQSVSSAYLAWYQQKPGQP |
| | | PRLLISGASTRATGIPDRFGGSGSGTDFTLTISRLEPEDFAVYYCQHYGSSF |
| | | NGSSLFTFGQGTRLEIKTTTPAPRPPTPAPTIASQPLSLRPEACRPAAGGA |
| | | VHTRGLDFACDIYIWAPLAGTCGVLLLSLVITLYCKRGRKKLLYIFKQPFMRP |
| | | VQTTQEEDGCSCRFPEEEEGGCELRVKFSRSADAPAYKQGQNQLYNELN |
| | | LGRREEYDVLDKRRGRDPEMGGKPRRKNPQEGLYNELQKDKMAEAYSEI |
| | | GMKGERRRGKGHDGLYQGLSTATKDTYDALHMQALPPR |
| BCMA_EBB- | 836 | ATGGCCCTCCCTGTCACCGCCCTGCTGCTTCCGCTGGCTCTTCTGCTC |
| C1978-A4-nt | | CACGCCGCTCGGCCCGAAGTGCAGCTCGTGGAGTCAGGAGGCGGCCT |
| Full CART | | GGTCCAGCCGGGAGGGTCCCTTAGACTGTCATGCGCCGCAAGCGGAT |
| | | TCACTTTCTCCTCCTATGCCATGAGCTGGGTCCGCCAAGCCCCCGGAA |
| | | AGGGACTGGAATGGGTGTCCGCCATCTCGGGGTCTGGAGGCTCAACTT |
| | | ACTACGCTGACTCCGTGAAGGGACGGTTCACCATTAGCCGCGACAACT |
| | | CCAAGAACACCCTCTACCTCCAAATGAACTCCCTGCGGGCCGAGGATA |
| | | CCGCCGTCTACTACTGCGCCAAAGTGGAAGGTTCAGGATCGCTGGACT |
| | | ACTGGGGACAGGGTACTCTCGTGACCGTGTCATCGGGCGGAGGAGGT |
| | | TCCGGCGGTGGCGGCTCCGGCGGCGGAGGGTCGGAGATCGTGATGA |
| | | CCCAGAGCCCTGGTACTCTGAGCCTTTCGCCGGGAGAAAGGGCCACC |
| | | CTGTCCTGCCGCGCTTCCCAATCCGTGTCCTCCGCGTACTTGGCGTGG |
| | | TACCAGCAGAAGCCGGGACAGCCCCCTCGGCTGCTGATCAGCGGGGC |
| | | CAGCACCCGGGCAACCGGAATCCCAGACAGATTCGGGGGTTCCGGCA |
| | | GCGGCACAGATTTCACCCTGACTATTTCGAGGTTGGAGCCCGAGGACT |
| | | TTGCGGTGTATTACTGTCAGCACTACGGGTCGTCCTTTAATGGCTCCAG |
| | | CCTGTTCACGTTCGGACAGGGGACCCGCCTGGAAATCAAGACCACTAC |
| | | CCCAGCACCGAGGCCACCCACCCCGGCTCCTACCATCGCCTCCCAGC |
| | | CTCTGTCCCTGCGTCCGGAggcatgtagacccgcagctggtggggccgtgcatacccggg |
| | | gtcttgacttcgcctgcgatatctacatttgggcccctctggctggtacttgcggggtcctgctgctttcactcgt |
| | | gatcactctttactgtaagcgcggtcggaagaagctgctgtacatctttaagcaacccttcatgaggcctgt |
| | | gcagactactcaagaggaggacggctgttcatgccggttcccagaggaggaggaaggcggctgcgaa |
| | | ctgcgcgtgaaattcagccgcagcgcagatgctccagcctacaagcaggggcagaaccagctctaca |
| | | acgaactcaatcttggtcggagagaggagtacgacgtgctggacaagcggagaggacgggacccag |
| | | aaatgggcgggaagccgcgcagaaagaatccccaagagggcctgtacaacgagctccaaaaggat |
| | | aagatggcagaagcctatagcgagattggtatgaaaggggaacgcagaagaggcaaaggccacga |
| | | cggactgtaccagggactcagcaccgccaccaaggacacctatgacgctcttcacatgcaggccctgc |
| | | cgcctcgg |

BCMA_EBB-C1978-G1

| | | |
|---|---|---|
| BCMA_EBB- | 837 | MALPVTALLLPLALLLHAARPEVQLVETGGGLVQPGGSLRLSCAASGITFS |
| C1978-G1-aa | | RYPMSWVRQAPGKGLEWVSGISDSGVSTYYADSAKGRFTISRDNSKNTLF |
| Full CART | | LQMSSLRDEDTAVYYCVTRAGSEASDIWGQGTMVTVSSGGGGSGGGGS |
| | | GGGGSEIVLTQSPATLSLSPGERATLSCRASQSVSNSLAWYQQKPGQAPR |
| | | LLIYDASSRATGIPDRFSGSGSGTDFTLTISRLEPEDFAIYYCQQFGTSSGLT |
| | | FGGGTKLEIKTTTPAPRPPTPAPTIASQPLSLRPEACRPAAGGAVHTRGLD |
| | | FACDIYIWAPLAGTCGVLLLSLVITLYCKRGRKKLLYIFKQPFMRPVQTTQEE |
| | | DGCSCRFPEEEEGGCELRVKFSRSADAPAYKQGQNQLYNELNLGRREEY |
| | | DVLDKRRGRDPEMGGKPRRKNPQEGLYNELQKDKMAEAYSEIGMKGER |
| | | RRGKGHDGLYQGLSTATKDTYDALHMQALPPR |
| BCMA_EBB- | 838 | ATGGCCCTCCCTGTCACCGCCCTGCTGCTTCCGCTGGCTCTTCTGCTC |
| C1978-G1-nt | | CACGCCGCTCGGCCCGAAGTGCAACTGGTGGAAACCGGTGGCGGCCT |
| Full CART | | GGTGCAGCCTGGAGGATCATTGAGGCTGTCATGCGCGGCCAGCGGTA |
| | | TTACCTTCTCCCGGTACCCCATGTCCTGGGTCAGACAGGCCCCGGGGA |
| | | AAGGGCTTGAATGGGTGTCCGGGATCTCGGACTCCGGTGTCAGCACTT |
| | | ACTACGCCGACTCCGCCAAGGGACGCTTCACCATTTCCCGGGACAACT |
| | | CGAAGAACACCCTGTTCCTCCAAATGAGCTCCCTCCGGGACGAGGATA |
| | | CTGCAGTGTACTACTGCGTGACCCGCGCCGGGTCCGAGGCGTCTGAC |
| | | ATTTGGGGACAGGGCACTATGGTCACCGTGTCGTCCGGCGGAGGGGG |
| | | CTCGGGAGGCGGTGGCAGCGGAGGAGGAGGGTCCGAGATCGTGCTG |
| | | ACCCAATCCCCGGCCACCCTCTCGCTGAGCCCTGGAGAAAGGGCAAC |
| | | CTTGTCCTGTCGCGCGAGCCAGTCCGTGAGCAACTCCCTGGCCTGGTA |
| | | CCAGCAGAAGCCCGGACAGGCTCCGAGACTTCTGATCTACGACGCTTC |
| | | GAGCCGGGCCACTGGAATCCCCGACCGCTTTTCGGGGTCCGGCTCAG |
| | | GAACCGATTTCACCCTGACAATCTCACGGCTGGAGCCAGAGGATTTCG |
| | | CCATCTATTACTGCCAGCAGTTCGGTACTTCCTCCGGCCTGACTTTCGG |
| | | AGGCGGCACGAAGCTCGAAATCAAGACCACTACCCCAGCACCGAGGC |
| | | CACCCACCCCGGCTCCTACCATCGCCTCCCAGCCTCTGTCCCTGCGTC |
| | | CGGAggcatgtagacccgcagctggtggggccgtgcatacccggggtcttgacttcgcctgcgatatct |
| | | acatttgggcccctctggctggtacttgcggggtcctgctgctttcactcgtgatcactctttactgtaagcgcg |
| | | gtcggaagaagctgctgtacatctttaagcaacccttcatgaggcctgtgcagactactcaagaggagga |
| | | cggctgttcatgccggttcccagaggaggaggaaggcggctgcgaactgcgcgtgaaattcagccgca |
| | | gcgcagatgctccagcctacaagcaggggcagaaccagctctacaacgaactcaatcttggtcggaga |
| | | gaggagtacgacgtgctggacaagcggagaggacgggacccagaaatgggcgggaagccgcgca |
| | | gaaagaatccccaagagggcctgtacaacgagctccaaaaggataagatggcagaagcctatagcg |
| | | agattggtatgaaaggggaacgcagaagaggcaaaggccacgacggactgtaccagggactcagc |
| | | accgccaccaaggacacctatgacgctcttcacatgcaggccctgccgcctcgg |

BCMA_EBB-C1979-C1

| | | |
|---|---|---|
| BCMA_EBB- | 839 | MALPVTALLLPLALLLHAARPQVQLVESGGGLVQPGGSLRLSCAASGFTFS |
| C1979-C1-aa | | SYAMSWVRQAPGKGLEWVSAISGSGGSTYYADSVKGRFTISRDNAKNSL |
| Full CART | | YLQMNSLRAEDTAIYYCARATYKRELRYYYGMDVWGQGTMVTVSSGGGG |
| | | SGGGGSGGGGSEIVMTQSPGTVSLSPGERATLSCRASQSVSSSFLAWYQ |
| | | QKPGQAPRLLIYGASSRATGIPDRFSGSGSGTDFTLTISRLEPEDSAVYYC |
| | | QQYHSSPSWTFGQGTRLEIKTTTPAPRPPTPAPTIASQPLSLRPEACRPAA |
| | | GGAVHTRGLDFACDIYIWAPLAGTCGVLLLSLVITLYCKRGRKKLLYIFKQPF |
| | | MRPVQTTQEEDGCSCRFPEEEEGGCELRVKFSRSADAPAYKQGQNQLYN |
| | | ELNLGRREEYDVLDKRRGRDPEMGGKPRRKNPQEGLYNELQKDKMAEAY |
| | | SEIGMKGERRRGKGHDGLYQGLSTATKDTYDALHMQALPPR |
| BCMA_EBB- | 840 | ATGGCCCTCCCTGTCACCGCCCTGCTGCTTCCGCTGGCTCTTCTGCTC |
| C1979-C1-nt | | CACGCCGCTCGGCCCCAAGTGCAGCTCGTGGAATCGGGTGGCGGACT |
| Full CART | | GGTGCAGCCGGGGGGCTCACTTAGACTGTCCTGCGCGGCCAGCGGAT |
| | | TCACTTTCTCCTCCTACGCCATGTCCTGGGTCAGACAGGCCCCTGGAA |
| | | AGGGCCTGGAATGGGTGTCCGCAATCAGCGGCAGCGGCGGCTCGACC |
| | | TATTACGCGGATTCAGTGAAGGGCAGATTCACCATTTCCCGGGACAAC |
| | | GCCAAGAACTCCTTGTACCTTCAAATGAACTCCCTCCGCGCGGAAGATA |
| | | CCGCAATCTACTACTGCGCTCGGGCCACTTACAAGAGGGAACTGCGCT |
| | | ACTACTACGGGATGGACGTCTGGGGCCAGGGAACCATGGTCACCGTG |
| | | TCCAGCGGAGGAGGAGGATCGGGAGGAGGCGGTAGCGGGGGTGGAG |
| | | GGTCGGAGATCGTGATGACCCAGTCCCCCGGCACTGTGTCGCTGTCC |
| | | CCCGGCGAACGGGCCACCCTGTCATGTCGGGCCAGCCAGTCAGTGTC |
| | | GTCAAGCTTCCTCGCCTGGTACCAGCAGAAACCGGGACAAGCTCCCCG |
| | | CCTGCTGATCTACGGAGCCAGCAGCCGGGCCACCGGTATTCCTGACC |
| | | GGTTCTCCGGTTCGGGGTCCGGGACCGACTTTACTCTGACTATCTCTC |
| | | GCCTCGAGCCAGAGGACTCCGCCGTGTATTACTGCCAGCAGTACCACT |
| | | CCTCCCCGTCCTGGACGTTCGGACAGGGCACAAGGCTGGAGATTAAGA |
| | | CCACTACCCCAGCACCGAGGCCACCCACCCCGGCTCCTACCATCGCCT |
| | | CCCAGCCTCTGTCCCTGCGTCCGGAggcatgtagacccgcagctggtggggccgtgc |
| | | atacccggggtcttgacttcgcctgcgatatctacatttgggcccctctggctggtacttgcggggtcctgctg |
| | | ctttcactcgtgatcactctttactgtaagcgcggtcggaagaagctgctgtacatctttaagcaacccttcat |
| | | gaggcctgtgcagactactcaagaggaggacggctgttcatgccggttcccagaggaggaggaaggc |
| | | ggctgcgaactgcgcgtgaaattcagccgcagcgcagatgctccagcctacaagcaggggcagaacc |
| | | agctctacaacgaactcaatcttggtcggagagaggagtacgacgtgctggacaagcggagaggacg |
| | | ggacccagaaatgggcgggaagccgcgcagaaagaatccccaagagggcctgtacaacgagctcc |
| | | aaaaggataagatggcagaagcctatagcgagattggtatgaaaggggaacgcagaagaggcaaa |
| | | ggccacgacggactgtaccagggactcagcaccgccaccaaggacacctatgacgctcttcacatgca |
| | | ggccctgccgcctcgg |

BCMA_EBB-C1978-C7

| | | |
|---|---|---|
| BCMA_EBB- | 841 | MALPVTALLLPLALLLHAARPEVQLVETGGGLVQPGGSLRLSCAASGFTFS |
| C1978-C7-aa | | SYAMSWVRQAPGKGLEWVSAISGSGGSTYYADSVKGRFTISRDNSKNTLY |
| Full CART | | LQMNTLKAEDTAVYYCARATYKRELRYYYGMDVWGQGTTVTVSSGGGGS |
| | | GGGGSGGGGSEIVLTQSPSTLSLSPGESATLSCRASQSVSTTFLAWYQQK |
| | | PGQAPRLLIYGSSNRATGIPDRFSGSGSGTDFTLTIRRLEPEDFAVYYCQQ |
| | | YHSSPSWTFGQGTKVEIKTTTPAPRPPTPAPTIASQPLSLRPEACRPAAGG |
| | | AVHTRGLDFACDIYIWAPLAGTCGVLLLSLVITLYCKRGRKKLLYIFKQPFMR |
| | | PVQTTQEEDGCSCRFPEEEEGGCELRVKFSRSADAPAYKQGQNQLYNEL |
| | | NLGRREEYDVLDKRRGRDPEMGGKPRRKNPQEGLYNELQKDKMAEAYS |
| | | EIGMKGERRRGKGHDGLYQGLSTATKDTYDALHMQALPPR |
| BCMA_EBB- | 842 | ATGGCCCTCCCTGTCACCGCCCTGCTGCTTCCGCTGGCTCTTCTGCTC |
| C1978-C7-nt | | CACGCCGCTCGGCCCGAGGTGCAGCTTGTGGAAACCGGTGGCGGACT |
| Full CART | | GGTGCAGCCCGGAGGAAGCCTCAGGCTGTCCTGCGCCGCGTCCGGCT |
| | | TCACCTTCTCCTCGTACGCCATGTCCTGGGTCCGCCAGGCCCCCGGAA |
| | | AGGGCCTGGAATGGGTGTCCGCCATCTCTGGAAGCGGAGGTTCCACG |
| | | TACTACGCGGACAGCGTCAAGGGAAGGTTCACAATCTCCCGCGATAAT |
| | | TCGAAGAACACTCTGTACCTTCAAATGAACACCCTGAAGGCCGAGGAC |
| | | ACTGCTGTGTACTACTGCGCACGGGCCACCTACAAGAGAGAGCTCCGG |
| | | TACTACTACGGAATGGACGTCTGGGGCCAGGGAACTACTGTGACCGTG |
| | | TCCTCGGGAGGGGGTGGCTCCGGGGGGGGCGGCTCCGGCGGAGGC |
| | | GGTTCCGAGATTGTGCTGACCCAGTCACCTTCAACTCTGTCGCTGTCC |
| | | CCGGGAGAGAGCGCTACTCTGAGCTGCCGGGCCAGCCAGTCCGTGTC |
| | | CACCACCTTCCTCGCCTGGTATCAGCAGAAGCCGGGGCAGGCACCAC |
| | | GGCTCTTGATCTACGGGTCAAGCAACAGAGCGACCGGAATTCCTGACC |
| | | GCTTCTCGGGGAGCGGTTCAGGCACCGACTTCACCCTGACTATCCGGC |
| | | GCCTGGAACCCGAAGATTTCGCCGTGTATTACTGTCAACAGTACCACTC |
| | | CTCGCCGTCCTGGACCTTTGGCCAAGGAACCAAAGTGGAAATCAAGAC |
| | | CACTACCCCAGCACCGAGGCCACCCACCCCGGCTCCTACCATCGCCTC |
| | | CCAGCCTCTGTCCCTGCGTCCGGAggcatgtagacccgcagctggtggggccgtgcat |
| | | acccggggtcttgacttcgcctgcgatatctacatttgggcccctctggctggtacttgcggggtcctgctgctt |
| | | tcactcgtgatcactctttactgtaagcgcggtcggaagaagctgctgtacatctttaagcaacccttcatga |
| | | ggcctgtgcagactactcaagaggaggacggctgttcatgccggttcccagaggaggaggaaggcgg |
| | | ctgcgaactgcgcgtgaaattcagccgcagcgcagatgctccagcctacaagcaggggcagaaccag |
| | | ctctacaacgaactcaatcttggtcggagagaggagtacgacgtgctggacaagcggagaggacggg |
| | | acccagaaatgggcgggaagccgcgcagaaagaatccccaagagggcctgtacaacgagctccaa |
| | | aaggataagatggcagaagcctatagcgagattggtatgaaaggggaacgcagaagaggcaaagg |
| | | ccacgacggactgtaccagggactcagcaccgccaccaaggacacctatgacgctcttcacatgcagg |
| | | ccctgccgcctcgg |

BCMA_EBB-C1978-D10

| | | |
|---|---|---|
| BCMA_EBB- | 843 | MALPVTALLLPLALLLHAARPEVQLVETGGGLVQPGRSLRLSCAASGFTFD |
| C1978-D10-aa | | DYAMHWVRQAPGKGLEWVSGISWNSGSIGYADSVKGRFTISRDNAKNSL |
| Full CART | | YLQMNSLRDEDTAVYYCARVGKAVPDVWGQGTTVTVSSGGGGSGGGGS |
| | | GGGGSDIVMTQTPSSLSASVGDRVTITCRASQSISSYLNWYQQKPGKAPK |
| | | LLIYAASSLQSGVPSRFSGSGSGTDFTLTISSLQPEDFATYYCQQSYSTPYS |
| | | FGQGTRLEIKTTTPAPRPPTPAPTIASQPLSLRPEACRPAAGGAVHTRGLD |
| | | FACDIYIWAPLAGTCGVLLLSLVITLYCKRGRKKLLYIFKQPFMRPVQTTQEE |
| | | DGCSCRFPEEEEGGCELRVKFSRSADAPAYKQGQNQLYNELNLGRREEY |
| | | DVLDKRRGRDPEMGGKPRRKNPQEGLYNELQKDKMAEAYSEIGMKGER |
| | | RRGKGHDGLYQGLSTATKDTYDALHMQALPPR |
| BCMA_EBB- | 844 | ATGGCCCTCCCTGTCACCGCCCTGCTGCTTCCGCTGGCTCTTCTGCTC |
| C1978-D10-nt | | CACGCCGCTCGGCCCGAAGTGCAGCTCGTGGAAACTGGAGGTGGACT |
| Full CART | | CGTGCAGCCTGGACGGTCGCTGCGGCTGAGCTGCGCTGCATCCGGCT |
| | | TCACCTTCGACGATTATGCCATGCACTGGGTCAGACAGGCGCCAGGGA |
| | | AGGGACTTGAGTGGGTGTCCGGTATCAGCTGGAATAGCGGCTCAATCG |
| | | GATACGCGGACTCCGTGAAGGGAAGGTTCACCATTTCCCGCGACAACG |
| | | CCAAGAACTCCCTGTACTTGCAAATGAACAGCCTCCGGGATGAGGACA |
| | | CTGCCGTGTACTACTGCGCCCGCGTCGGAAAAGCTGTGCCCGACGTCT |
| | | GGGGCCAGGGAACCACTGTGACCGTGTCCAGCGGCGGGGGTGGATC |
| | | GGGCGGTGGAGGGTCCGGTGGAGGGGGCTCAGATATTGTGATGACCC |
| | | AGACCCCCTCGTCCCTGTCCGCCTCGGTCGGCGACCGCGTGACTATCA |
| | | CATGTAGAGCCTCGCAGAGCATCTCCAGCTACCTGAACTGGTATCAGC |
| | | AGAAGCCGGGGAAGGCCCCGAAGCTCCTGATCTACGCGGCATCATCA |
| | | CTGCAATCGGGAGTGCCGAGCCGGTTTTCCGGGTCCGGCTCCGGCAC |
| | | CGACTTCACGCTGACCATTTCTTCCCTGCAACCCGAGGACTTCGCCACT |
| | | TACTACTGCCAGCAGTCCTACTCCACCCCTTACTCCTTCGGCCAAGGAA |
| | | CCAGGCTGGAAATCAAGACCACTACCCCAGCACCGAGGCCACCCACC |
| | | CCGGCTCCTACCATCGCCTCCCAGCCTCTGTCCCTGCGTCCGGAggcat |
| | | gtagacccgcagctggtggggccgtgcatacccggggtcttgacttcgcctgcgatatctacatttgggcc |
| | | cctctggctggtacttgcggggtcctgctgctttcactcgtgatcactctttactgtaagcgcggtcggaagaa |
| | | gctgctgtacatctttaagcaacccttcatgaggcctgtgcagactactcaagaggaggacggctgttcat |
| | | gccggttcccagaggaggaggaaggcggctgcgaactgcgcgtgaaattcagccgcagcgcagatg |
| | | ctccagcctacaagcaggggcagaaccagctctacaacgaactcaatcttggtcggagagaggagtac |
| | | gacgtgctggacaagcggagaggacgggacccagaaatgggcgggaagccgcgcagaaagaatc |
| | | cccaagagggcctgtacaacgagctccaaaaggataagatggcagaagcctatagcgagattggtatg |
| | | aaaggggaacgcagaagaggcaaaggccacgacggactgtaccagggactcagcaccgccacca |
| | | aggacacctatgacgctcttcacatgcaggccctgccgcctcgg |

BCMA_EBB-C1979-C12

| | | |
|---|---|---|
| BCMA_EBB- | 845 | MALPVTALLLPLALLLHAARPEVQLVESGGGLVQPGRSLRLSCTASGFTFD |
| C1979-C12-aa | | DYAMHWVRQRPGKGLEWVASINWKGNSLAYGDSVKGRFAISRDNAKNTV |
| Full CART | | FLQMNSLRTEDTAVYYCASHQGVAYYNYAMDVWGRGTLVTVSSGGGGS |
| | | GGGGSGGGGSEIVLTQSPGTLSLSPGERATLSCRATQSIGSSFLAWYQQR |
| | | PGQAPRLLIYGASQRATGIPDRFSGRGSGTDFTLTISRVEPEDSAVYYCQH |
| | | YESSPSWTFGQGTKVEIKTTTPAPRPPTPAPTIASQPLSLRPEACRPAAGG |
| | | AVHTRGLDFACDIYIWAPLAGTCGVLLLSLVITLYCKRGRKKLLYIFKQPFMR |
| | | PVQTTQEEDGCSCRFPEEEEGGCELRVKFSRSADAPAYKQGQNQLYNEL |
| | | NLGRREEYDVLDKRRGRDPEMGGKPRRKNPQEGLYNELQKDKMAEAYS |
| | | EIGMKGERRRGKGHDGLYQGLSTATKDTYDALHMQALPPR |
| BCMA_EBB- | 846 | ATGGCCCTCCCTGTCACCGCCCTGCTGCTTCCGCTGGCTCTTCTGCTC |
| C1979-C12-nt | | CACGCCGCTCGGCCCGAAGTGCAGCTCGTGGAGAGCGGGGGAGGATT |
| Full CART | | GGTGCAGCCCGGAAGGTCCCTGCGGCTCTCCTGCACTGCGTCTGGCT |
| | | TCACCTTCGACGACTACGCGATGCACTGGGTCAGACAGCGCCCGGGA |
| | | AAGGGCCTGGAATGGGTCGCCTCAATCAACTGGAAGGGAAACTCCCTG |
| | | GCCTATGGCGACAGCGTGAAGGGCCGCTTCGCCATTTCGCGCGACAA |
| | | CGCCAAGAACACCGTGTTTCTGCAAATGAATTCCCTGCGGACCGAGGA |
| | | TACCGCTGTGTACTACTGCGCCAGCCACCAGGGCGTGGCATACTATAA |
| | | CTACGCCATGGACGTGTGGGGAAGAGGGACGCTCGTCACCGTGTCCT |
| | | CCGGGGGCGGTGGATCGGGTGGAGGAGGAAGCGGTGGCGGGGGCA |
| | | GCGAAATCGTGCTGACTCAGAGCCCGGGAACTCTTTCACTGTCCCCGG |
| | | GAGAACGGGCCACTCTCTCGTGCCGGGCCACCCAGTCCATCGGCTCC |
| | | TCCTTCCTTGCCTGGTACCAGCAGAGGCCAGGACAGGCGCCCCGCCT |
| | | GCTGATCTACGGTGCTTCCCAACGCGCCACTGGCATTCCTGACCGGTT |
| | | CAGCGGCAGAGGGTCGGGAACCGATTTCACACTGACCATTTCCCGGGT |
| | | GGAGCCCGAAGATTCGGCAGTCTACTACTGTCAGCATTACGAGTCCTC |
| | | CCCTTCATGGACCTTCGGTCAAGGGACCAAAGTGGAGATCAAGACCAC |
| | | TACCCCAGCACCGAGGCCACCCACCCCGGCTCCTACCATCGCCTCCCA |
| | | GCCTCTGTCCCTGCGTCCGGAggcatgtagacccgcagctggtggggccgtgcataccc |
| | | ggggtcttgacttcgcctgcgatatctacatttgggcccctctggctggtacttgcggggtcctgctgctttcac |
| | | tcgtgatcactctttactgtaagcgcggtcggaagaagctgctgtacatctttaagcaacccttcatgaggcc |
| | | tgtgcagactactcaagaggaggacggctgttcatgccggttcccagaggaggaggaaggcggctgcg |
| | | aactgcgcgtgaaattcagccgcagcgcagatgctccagcctacaagcaggggcagaaccagctcta |
| | | caacgaactcaatcttggtcggagagaggagtacgacgtgctggacaagcggagaggacgggaccc |
| | | agaaatgggcgggaagccgcgcagaaagaatccccaagagggcctgtacaacgagctccaaaagg |
| | | ataagatggcagaagcctatagcgagattggtatgaaaggggaacgcagaagaggcaaaggccacg |
| | | acggactgtaccagggactcagcaccgccaccaaggacacctatgacgctcttcacatgcaggccctg |
| | | ccgcctcgg |

BCMA_EBB-C1980-G4

| | | |
|---|---|---|
| BCMA_EBB- | 847 | MALPVTALLLPLALLLHAARPEVQLVESGGGLVQPGGSLRLSCAASGFTFS |
| C1980-G4-aa | | SYAMSWVRQAPGKGLEWVSAISGSGGSTYYADSVKGRFTISRDNSKNTLY |
| Full CART | | LQMNSLRAEDTAVYYCAKVVRDGMDVWGQGTTVTVSSGGGGSGGGGS |
| | | GGGGSEIVLTQSPATLSLSPGERATLSCRASQSVSSSYLAWYQQKPGQAP |
| | | RLLIYGASSRATGIPDRFSGNGSGTDFTLTISRLEPEDFAVYYCQQYGSPP |
| | | RFTFGPGTKVDIKTTTPAPRPPTPAPTIASQPLSLRPEACRPAAGGAVHTR |
| | | GLDFACDIYIWAPLAGTCGVLLLSLVITLYCKRGRKKLLYIFKQPFMRPVQTT |
| | | QEEDGCSCRFPEEEEGGCELRVKFSRSADAPAYKQGQNQLYNELNLGRR |
| | | EEYDVLDKRRGRDPEMGGKPRRKNPQEGLYNELQKDKMAEAYSEIGMKG |
| | | ERRRGKGHDGLYQGLSTATKDTYDALHMQALPPR |
| BCMA_EBB- | 848 | ATGGCCCTCCCTGTCACCGCCCTGCTGCTTCCGCTGGCTCTTCTGCTC |
| C1980-G4-nt | | CACGCCGCTCGGCCCGAGGTGCAGTTGGTCGAAAGCGGGGGCGGGC |
| Full CART | | TTGTGCAGCCTGGCGGATCACTGCGGCTGTCCTGCGCGGCATCAGGC |
| | | TTCACGTTTTCTTCCTACGCCATGTCCTGGGTGCGCCAGGCCCCTGGA |
| | | AAGGGACTGGAATGGGTGTCCGCGATTTCGGGGTCCGGCGGGAGCAC |
| | | CTACTACGCCGATTCCGTGAAGGGCCGCTTCACTATCTCGCGGGACAA |
| | | CTCCAAGAACACCCTCTACCTCCAAATGAATAGCCTGCGGGCCGAGGA |
| | | TACCGCCGTCTACTATTGCGCTAAGGTCGTGCGCGACGGAATGGACGT |
| | | GTGGGGACAGGGTACCACCGTGACAGTGTCCTCGGGGGGAGGCGGTA |
| | | GCGGCGGAGGAGGAAGCGGTGGTGGAGGTTCCGAGATTGTGCTGACT |
| | | CAATCACCCGCGACCCTGAGCCTGTCCCCCGGCGAAAGGGCCACTCT |
| | | GTCCTGTCGGGCCAGCCAATCAGTCTCCTCCTCGTACCTGGCCTGGTA |
| | | CCAGCAGAAGCCAGGACAGGCTCCGAGACTCCTTATCTATGGCGCATC |
| | | CTCCCGCGCCACCGGAATCCCGGATAGGTTCTCGGGAAACGGATCGG |
| | | GGACCGACTTCACTCTCACCATCTCCCGGCTGGAACCGGAGGACTTCG |
| | | CCGTGTACTACTGCCAGCAGTACGGCAGCCCGCCTAGATTCACTTTCG |
| | | GCCCCGGCACCAAAGTGGACATCAAGACCACTACCCCAGCACCGAGG |
| | | CCACCCACCCCGGCTCCTACCATCGCCTCCCAGCCTCTGTCCCTGCGT |
| | | CCGGAggcatgtagacccgcagctggtggggccgtgcatacccggggtcttgacttcgcctgcgatat |
| | | ctacatttgggcccctctggctggtacttgcggggtcctgctgctttcactcgtgatcactctttactgtaagcgc |
| | | ggtcggaagaagctgctgtacatctttaagcaacccttcatgaggcctgtgcagactactcaagaggagg |
| | | acggctgttcatgccggttcccagaggaggaggaaggcggctgcgaactgcgcgtgaaattcagccgc |
| | | agcgcagatgctccagcctacaagcaggggcagaaccagctctacaacgaactcaatcttggtcggag |
| | | agaggagtacgacgtgctggacaagcggagaggacgggacccagaaatgggcgggaagccgcgc |
| | | agaaagaatccccaagagggcctgtacaacgagctccaaaaggataagatggcagaagcctatagc |
| | | gagattggtatgaaaggggaacgcagaagaggcaaaggccacgacggactgtaccagggactcag |
| | | caccgccaccaaggacacctatgacgctcttcacatgcaggccctgccgcctcgg |

BCMA_EBB-C1980-D2

| | | |
|---|---|---|
| BCMA_EBB- | 849 | MALPVTALLLPLALLLHAARPEVQLLESGGGLVQPGGSLRLSCAASGFTFS |
| C1980-D2-aa | | SYAMSWVRQAPGKGLEWVSAISGSGGSTYYADSVKGRFTISRDNSKNTLY |
| Full CART | | LQMNSLRAEDTAVYYCAKIPQTGTFDYWGQGTLVTVSSGGGGSGGGGSG |
| | | GGGSEIVLTQSPGTLSLSPGERATLSCRASQSVSSSYLAWYQQRPGQAPR |
| | | LLIYGASSRATGIPDRFSGSGSGTDFTLTISRLEPEDFAVYYCQHYGSSPS |
| | | WTFGQGTRLEIKTTTPAPRPPTPAPTIASQPLSLRPEACRPAAGGAVHTRG |
| | | LDFACDIYIWAPLAGTCGVLLLSLVITLYCKRGRKKLLYIFKQPFMRPVQTTQ |
| | | EEDGCSCRFPEEEEGGCELRVKFSRSADAPAYKQGQNQLYNELNLGRRE |
| | | EYDVLDKRRGRDPEMGGKPRRKNPQEGLYNELQKDKMAEAYSEIGMKGE |
| | | RRRGKGHDGLYQGLSTATKDTYDALHMQALPPR |
| BCMA_EBB- | 850 | ATGGCCCTCCCTGTCACCGCCCTGCTGCTTCCGCTGGCTCTTCTGCTC |
| C1980-D2-nt | | CACGCCGCTCGGCCCGAAGTGCAGCTGCTGGAGTCCGGCGGTGGATT |
| Full CART | | GGTGCAACCGGGGGGATCGCTCAGACTGTCCTGTGCGGCGTCAGGCT |
| | | TCACCTTCTCGAGCTACGCCATGTCATGGGTCAGACAGGCCCCTGGAA |
| | | AGGGTCTGGAATGGGTGTCCGCCATTTCCGGGAGCGGGGGATCTACA |
| | | TACTACGCCGATAGCGTGAAGGGCCGCTTCACCATTTCCCGGGACAAC |
| | | TCCAAGAACACTCTCTATCTGCAAATGAACTCCCTCCGCGCTGAGGACA |
| | | CTGCCGTGTACTACTGCGCCAAAATCCCTCAGACCGGCACCTTCGACT |
| | | ACTGGGGACAGGGGACTCTGGTCACCGTCAGCAGCGGTGGCGGAGGT |
| | | TCGGGGGGAGGAGGAAGCGGCGGCGGAGGGTCCGAGATTGTGCTGA |
| | | CCCAGTCACCCGGCACTTTGTCCCTGTCGCCTGGAGAAAGGGCCACCC |
| | | TTTCCTGCCGGGCATCCCAATCCGTGTCCTCCTCGTACCTGGCCTGGT |
| | | ACCAGCAGAGGCCCGGACAGGCCCCACGGCTTCTGATCTACGGAGCA |
| | | AGCAGCCGCGCGACCGGTATCCCGGACCGGTTTTCGGGCTCGGGCTC |
| | | AGGAACTGACTTCACCCTCACCATCTCCCGCCTGGAACCCGAAGATTT |
| | | CGCTGTGTATTACTGCCAGCACTACGGCAGCTCCCCGTCCTGGACGTT |
| | | CGGCCAGGGAACTCGGCTGGAGATCAAGACCACTACCCCAGCACCGA |
| | | GGCCACCCACCCCGGCTCCTACCATCGCCTCCCAGCCTCTGTCCCTGC |
| | | GTCCGGAggcatgtagacccgcagctggtggggccgtgcatacccggggtcttgacttcgcctgcg |
| | | atatctacatttgggcccctctggctggtacttgcggggtcctgctgctttcactcgtgatcactctttactgtaa |
| | | gcgcggtcggaagaagctgctgtacatctttaagcaacccttcatgaggcctgtgcagactactcaagag |
| | | gaggacggctgttcatgccggttcccagaggaggaggaaggcggctgcgaactgcgcgtgaaattcag |
| | | ccgcagcgcagatgctccagcctacaagcaggggcagaaccagctctacaacgaactcaatcttggtc |
| | | ggagagaggagtacgacgtgctggacaagcggagaggacgggacccagaaatgggcgggaagcc |
| | | gcgcagaaagaatccccaagagggcctgtacaacgagctccaaaaggataagatggcagaagccta |
| | | tagcgagattggtatgaaaggggaacgcagaagaggcaaaggccacgacggactgtaccagggact |
| | | cagcaccgccaccaaggacacctatgacgctcttcacatgcaggccctgccgcctcgg |

BCMA_EBB-C1978-A10

| | | |
|---|---|---|
| BCMA_EBB- | 851 | MALPVTALLLPLALLLHAARPEVQLVETGGGLVQPGGSLRLSCAASGFTFS |
| C1978-A10-aa | | SYAMSWVRQAPGKGLEWVSAISGSGGSTYYADSVKGRFTMSRENDKNS |
| Full CART | | VFLQMNSLRVEDTGVYYCARANYKRELRYYYGMDVWGQGTMVTVSSGG |
| | | GGSGGGGSGGGGSEIVMTQSPGTLSLSPGESATLSCRASQRVASNYLAW |
| | | YQHKPGQAPSLLISGASSRATGVPDRFSGSGSGTDFTLAISRLEPEDSAVY |
| | | YCQHYDSSPSWTFGQGTKVEIKTTTPAPRPPTPAPTIASQPLSLRPEACRP |
| | | AAGGAVHTRGLDFACDIYIWAPLAGTCGVLLLSLVITLYCKRGRKKLLYIFK |
| | | QPFMRPVQTTQEEDGCSCRFPEEEEGGCELRVKFSRSADAPAYKQGQN |
| | | QLYNELNLGRREEYDVLDKRRGRDPEMGGKPRRKNPQEGLYNELQKDK |
| | | [sequence omitted] |
| BCMA_EBB- | 852 | ATGGCCCTCCCTGTCACCGCCCTGCTGCTTCCGCTGGCTCTTCTGCTC |
| C1978-A10-nt | | CACGCCGCTCGGCCCGAAGTGCAACTGGTGGAAACCGGTGGAGGACT |
| Full CART | | CGTGCAGCCTGGCGGCAGCCTCCGGCTGAGCTGCGCCGCTTCGGGAT |
| | | TCACCTTTTCCTCCTACGCGATGTCTTGGGTCAGACAGGCCCCCGGAA |
| | | AGGGGCTGGAATGGGTGTCAGCCATCTCCGGCTCCGGCGGATCAACG |
| | | TACTACGCCGACTCCGTGAAAGGCCGGTTCACCATGTCGCGCGAGAAT |
| | | GACAAGAACTCCGTGTTCCTGCAAATGAACTCCCTGAGGGTGGAGGAC |
| | | ACCGGAGTGTACTATTGTGCGCGCGCCAACTACAAGAGAGAGCTGCGG |
| | | TACTACTACGGAATGGACGTCTGGGGACAGGGAACTATGGTGACCGTG |
| | | TCATCCGGTGGAGGGGGAAGCGGCGGTGGAGGCAGCGGGGGCGGGG |
| | | GTTCAGAAATTGTCATGACCCAGTCCCCGGGAACTCTTTCCCTCTCCCC |
| | | CGGGGAATCCGCGACTTTGTCCTGCCGGGCCAGCCAGCGCGTGGCCT |
| | | CGAACTACCTCGCATGGTACCAGCATAAGCCAGGCCAAGCCCCTTCCC |
| | | TGCTGATTTCCGGGGCTAGCAGCCGCGCCACTGGCGTGCCGGATAGG |
| | | TTCTCGGGAAGCGGCTCGGGTACCGATTTCACCCTGGCAATCTCGCGG |
| | | CTGGAACCGGAGGATTCGGCCGTGTACTACTGCCAGCACTATGACTCA |
| | | TCCCCCTCCTGGACATTCGGACAGGGCACCAAGGTCGAGATCAAGACC |
| | | ACTACCCCAGCACCGAGGCCACCCACCCCGGCTCCTACCATCGCCTCC |
| | | CAGCCTCTGTCCCTGCGTCCGGAggcatgtagacccgcagctggtggggccgtgcata |
| | | cccggggtcttgacttcgcctgcgatatctacatttgggcccctctggctggtacttgcggggtcctgctgcttt |
| | | cactcgtgatcactctttactgtaagcgcggtcggaagaagctgctgtacatctttaagcaacccttcatgag |
| | | gcctgtgcagactactcaagaggaggacggctgttcatgccggttcccagaggaggaggaaggcggct |
| | | gcgaactgcgcgtgaaattcagccgcagcgcagatgctccagcctacaagcaggggcagaaccagct |
| | | ctacaacgaactcaatcttggtcggagagaggagtacgacgtgctggacaagcggagaggacgggac |
| | | ccagaaatgggcgggaagccgcgcagaaagaatccccaagagggcctgtacaacgagctccaaaa |
| | | ggataagatggcagaagcctatagcgagattggtatgaaaggggaacgcagaagaggcaaaggcca |
| | | cgacggactgtaccagggactcagcaccgccaccaaggacacctatgacgctcttcacatgcaggccc |
| | | tgccgcctcgg |

BCMA_EBB-C1978-D4

| | | |
|---|---|---|
| BCMA_EBB- | 853 | MALPVTALLLPLALLLHAARPEVQLLETGGGLVQPGGSLRLSCAASGFSFS |
| C1978-D4-aa | | SYAMSWVRQAPGKGLEWVSAISGSGGSTYYADSVKGRFTISRDNSKNTLY |
| Full CART | | LQMNSLRAEDTAVYYCAKALVGATGAFDIWGQGTLVTVSSGGGGSGGGG |
| | | SGGGGSEIVLTQSPGTLSLSPGERATLSCRASQSLSSNFLAWYQQKPGQA |
| | | PGLLIYGASNWATGTPDRFSGSGSGTDFTLTITRLEPEDFAVYYCQYYGTS |
| | | PMYTFGQGTKVEIKTTTPAPRPPTPAPTIASQPLSLRPEACRPAAGGAVHT |
| | | RGLDFACDIYIWAPLAGTCGVLLLSLVITLYCKRGRKKLLYIFKQPFMRPVQ |
| | | TTQEEDGCSCRFPEEEEGGCELRVKFSRSADAPAYKQGQNQLYNELNLG |
| | | RREEYDVLDKRRGRDPEMGGKPRRKNPQEGLYNELQKDKMAEAYSEIGM |
| | | KGERRRGKGHDGLYQGLSTATKDTYDALHMQALPPR |
| BCMA_EBB- | 854 | ATGGCCCTCCCTGTCACCGCCCTGCTGCTTCCGCTGGCTCTTCTGCTC |
| C1978-D4-nt | | CACGCCGCTCGGCCCGAAGTGCAGCTGCTCGAAACCGGTGGAGGGCT |
| Full CART | | GGTGCAGCCAGGGGGCTCCCTGAGGCTTTCATGCGCCGCTAGCGGAT |
| | | TCTCCTTCTCCTCTTACGCCATGTCGTGGGTCCGCCAAGCCCCTGGAA |
| | | AAGGCCTGGAATGGGTGTCCGCGATTTCCGGGAGCGGAGGTTCGACC |
| | | TATTACGCCGACTCCGTGAAGGGCCGCTTTACCATCTCCCGGGATAAC |
| | | TCCAAGAACACTCTGTACCTCCAAATGAACTCGCTGAGAGCCGAGGAC |
| | | ACCGCCGTGTATTACTGCGCGAAGGCGCTGGTCGGCGCGACTGGGGC |
| | | ATTCGACATCTGGGGACAGGGAACTCTTGTGACCGTGTCGAGCGGAGG |
| | | CGGCGGCTCCGGCGGAGGAGGGAGCGGGGGCGGTGGTTCCGAAATC |
| | | GTGTTGACTCAGTCCCCGGGAACCCTGAGCTTGTCACCCGGGGAGCG |
| | | GGCCACTCTCTCCTGTCGCGCCTCCCAATCGCTCTCATCCAATTTCCTG |
| | | GCCTGGTACCAGCAGAAGCCCGGACAGGCCCCGGGCCTGCTCATCTA |
| | | CGGCGCTTCAAACTGGGCAACGGGAACCCCTGATCGGTTCAGCGGAA |
| | | GCGGATCGGGTACTGACTTTACCCTGACCATCACCAGACTGGAACCGG |
| | | AGGACTTCGCCGTGTACTACTGCCAGTACTACGGCACCTCCCCCATGT |
| | | ACACATTCGGACAGGGTACCAAGGTCGAGATTAAGACCACTACCCCAG |
| | | CACCGAGGCCACCCACCCCGGCTCCTACCATCGCCTCCCAGCCTCTGT |
| | | CCCTGCGTCCGGAggcatgtagacccgcagctggtggggccgtgcatacccggggtcttgactt |
| | | cgcctgcgatatctacatttgggcccctctggctggtacttgcggggtcctgctgctttcactcgtgatcactctt |
| | | tactgtaagcgcggtcggaagaagctgctgtacatctttaagcaacccttcatgaggcctgtgcagactac |
| | | tcaagaggaggacggctgttcatgccggttcccagaggaggaggaaggcggctgcgaactgcgcgtg |
| | | aaattcagccgcagcgcagatgctccagcctacaagcaggggcagaaccagctctacaacgaactca |
| | | atcttggtcggagagaggagtacgacgtgctggacaagcggagaggacgggacccagaaatgggcg |
| | | ggaagccgcgcagaaagaatccccaagagggcctgtacaacgagctccaaaaggataagatggca |
| | | gaagcctatagcgagattggtatgaaaggggaacgcagaagaggcaaaggccacgacggactgtac |
| | | cagggactcagcaccgccaccaaggacacctatgacgctcttcacatgcaggccctgccgcctcgg |

BCMA_EBB-C1980-A2

| | | |
|---|---|---|
| BCMA_EBB- | 855 | MALPVTALLLPLALLLHAARPEVQLLESGGGLVQPGGSLRLSCAASGFTFS |
| C1980-A2-aa | | SYAMSWVRQAPGKGLEWVSAISGSGGSTYYADSVKGRFTISRDNSKNTLY |
| Full CART | | LQMNSLRAEDTAVYYCVLWFGEGFDPWGQGTLVTVSSGGGGSGGGGSG |
| | | GGGSDIVLTQSPLSLPVTPGEPASISCRSSQSLLHSNGYNYLDWYLQKPG |
| | | QSPQLLIYLGSNRASGVPDRFSGSGSGTDFTLKISRVEAEDVGVYYCMQA |
| | | LQTPLTFGGGTKVDIKTTTPAPRPPTPAPTIASQPLSLRPEACRPAAGGAV |
| | | HTRGLDFACDIYIWAPLAGTCGVLLLSLVITLYCKRGRKKLLYIFKQPFMRPV |
| | | QTTQEEDGCSCRFPEEEEGGCELRVKFSRSADAPAYKQGQNQLYNELNL |
| | | GRREEYDVLDKRRGRDPEMGGKPRRKNPQEGLYNELQKDKMAEAYSEIG |
| | | [sequence omitted] |
| BCMA_EBB- | 856 | ATGGCCCTCCCTGTCACCGCCCTGCTGCTTCCGCTGGCTCTTCTGCTC |
| C1980-A2-nt | | CACGCCGCTCGGCCCGAAGTGCAGCTGCTTGAGAGCGGTGGAGGTCT |
| Full CART | | GGTGCAGCCCGGGGGATCACTGCGCCTGTCCTGTGCCGCGTCCGGTT |
| | | TCACTTTCTCCTCGTACGCCATGTCGTGGGTCAGACAGGCACCGGGAA |
| | | AGGGACTGGAATGGGTGTCAGCCATTTCGGGTTCGGGGGGCAGCACC |
| | | TACTACGCTGACTCCGTGAAGGGCCGGTTCACCATTTCCCGCGACAAC |
| | | TCCAAGAACACCTTGTACCTCCAAATGAACTCCCTGCGGGCCGAAGAT |
| | | ACCGCCGTGTATTACTGCGTGCTGTGGTTCGGAGAGGGATTCGACCCG |
| | | TGGGGACAAGGAACACTCGTGACTGTGTCATCCGGCGGAGGCGGCAG |
| | | CGGTGGCGGCGGTTCCGGCGGCGGCGGATCTGACATCGTGTTGACCC |
| | | AGTCCCCTCTGAGCCTGCCGGTCACTCCTGGCGAACCAGCCAGCATCT |
| | | CCTGCCGGTCGAGCCAGTCCCTCCTGCACTCCAATGGGTACAACTACC |
| | | TCGATTGGTATCTGCAAAAGCCGGGCCAGAGCCCCCAGCTGCTGATCT |
| | | ACCTTGGGTCAAACCGCGCTTCCGGGGTGCCTGATAGATTCTCCGGGT |
| | | CCGGGAGCGGAACCGACTTTACCCTGAAAATCTCGAGGGTGGAGGCC |
| | | GAGGACGTCGGAGTGTACTACTGCATGCAGGCGCTCCAGACTCCCCTG |
| | | ACCTTCGGAGGAGGAACGAAGGTCGACATCAAGACCACTACCCCAGCA |
| | | CCGAGGCCACCCACCCCGGCTCCTACCATCGCCTCCCAGCCTCTGTCC |
| | | CTGCGTCCGGAggcatgtagacccgcagctggtggggccgtgcatacccggggtcttgacttcgc |
| | | ctgcgatatctacatttgggcccctctggctggtacttgcggggtcctgctgctttcactcgtgatcactctttact |
| | | gtaagcgcggtcggaagaagctgctgtacatctttaagcaacccttcatgaggcctgtgcagactactca |
| | | agaggaggacggctgttcatgccggttcccagaggaggaggaaggcggctgcgaactgcgcgtgaaa |
| | | ttcagccgcagcgcagatgctccagcctacaagcaggggcagaaccagctctacaacgaactcaatct |
| | | tggtcggagagaggagtacgacgtgctggacaagcggagaggacgggacccagaaatgggcggga |
| | | agccgcgcagaaagaatccccaagagggcctgtacaacgagctccaaaaggataagatggcagaa |
| | | gcctatagcgagattggtatgaaaggggaacgcagaagaggcaaaggccacgacggactgtaccag |
| | | ggactcagcaccgccaccaaggacacctatgacgctcttcacatgcaggccctgccgcctcgg |

BCMA_EBB-C1981-C3

| | | |
|---|---|---|
| BCMA_EBB- | 857 | MALPVTALLLPLALLLHAARPQVQLVESGGGLVQPGGSLRLSCAASGFTFS |
| C1981-C3-aa | | SYAMSWVRQAPGKGLEWVSAISGSGGSTYYADSVKGRFTISRDNSKNTLY |
| Full CART | | LQMNSLRAEDTAVYYCAKVGYDSSGYYRDYYGMDVWGQGTTVTVSSGG |
| | | GGSGGGGSGGGGSEIVLTQSPGTLSLSPGERATLSCRASQSVSSSYLAW |
| | | YQQKPGQAPRLLIYGTSSRATGISDRFSGSGSGTDFTLTISRLEPEDFAVYY |
| | | CQHYGNSPPKFTFGPGTKLEIKTTTPAPRPPTPAPTIASQPLSLRPEACRPA |
| | | AGGAVHTRGLDFACDIYIWAPLAGTCGVLLLSLVITLYCKRGRKKLLYIFKQ |
| | | PFMRPVQTTQEEDGCSCRFPEEEEGGCELRVKFSRSADAPAYKQGQNQL |
| | | YNELNLGRREEYDVLDKRRGRDPEMGGKPRRKNPQEGLYNELQKDKMA |
| | | EAYSEIGMKGERRRGKGHDGLYQGLSTATKDTYDALHMQALPPR |
| BCMA_EBB- | 858 | ATGGCCCTCCCTGTCACCGCCCTGCTGCTTCCGCTGGCTCTTCTGCTC |
| C1981-C3-nt | | CACGCCGCTCGGCCCCAAGTGCAGCTCGTGGAGTCAGGCGGAGGACT |
| Full CART | | GGTGCAGCCCGGGGGCTCCCTGAGACTTTCCTGCGCGGCATCGGGTT |
| | | TTACCTTCTCCTCCTATGCTATGTCCTGGGTGCGCCAGGCCCCGGGAA |
| | | AGGGACTGGAATGGGTGTCCGCAATCAGCGGTAGCGGGGGCTCAACA |
| | | TACTACGCCGACTCCGTCAAGGGTCGCTTCACTATTTCCCGGGACAAC |
| | | TCCAAGAATACCCTGTACCTCCAAATGAACAGCCTCAGGGCCGAGGAT |
| | | ACTGCCGTGTACTACTGCGCCAAAGTCGGATACGATAGCTCCGGTTAC |
| | | TACCGGGACTACTACGGAATGGACGTGTGGGGACAGGGCACCACCGT |
| | | GACCGTGTCAAGCGGCGGAGGCGGTTCAGGAGGGGGAGGCTCCGGC |
| | | GGTGGAGGGTCCGAAATCGTCCTGACTCAGTCGCCTGGCACTCTGTCG |
| | | TTGTCCCCGGGGGAGCGCGCTACCCTGTCGTGTCGGGCGTCGCAGTC |
| | | CGTGTCGAGCTCCTACCTCGCGTGGTACCAGCAGAAGCCCGGACAGG |
| | | CCCCTAGACTTCTGATCTACGGCACTTCTTCACGCGCCACCGGGATCA |
| | | GCGACAGGTTCAGCGGCTCCGGCTCCGGGACCGACTTCACCCTGACC |
| | | ATTAGCCGGCTGGAGCCTGAAGATTTCGCCGTGTATTACTGCCAACACT |
| | | ACGGAAACTCGCCGCCAAAGTTCACGTTCGGACCCGGAACCAAGCTGG |
| | | AAATCAAGACCACTACCCCAGCACCGAGGCCACCCACCCCGGCTCCTA |
| | | CCATCGCCTCCCAGCCTCTGTCCCTGCGTCCGGAggcatgtagacccgcagctg |
| | | gtggggccgtgcatacccggggtcttgacttcgcctgcgatatctacatttgggcccctctggctggtacttg |
| | | cggggtcctgctgctttcactcgtgatcactctttactgtaagcgcggtcggaagaagctgctgtacatcttta |
| | | agcaacccttcatgaggcctgtgcagactactcaagaggaggacggctgttcatgccggttcccagagg |
| | | aggaggaaggcggctgcgaactgcgcgtgaaattcagccgcagcgcagatgctccagcctacaagca |
| | | ggggcagaaccagctctacaacgaactcaatcttggtcggagagaggagtacgacgtgctggacaag |
| | | cggagaggacgggacccagaaatgggcgggaagccgcgcagaaagaatccccaagagggcctgt |
| | | acaacgagctccaaaaggataagatggcagaagcctatagcgagattggtatgaaaggggaacgca |
| | | gaagaggcaaaggccacgacggactgtaccagggactcagcaccgccaccaaggacacctatgac |
| | | gctcttcacatgcaggccctgccgcctcgg |

BCMA_EBB-C1978-G4

| | | |
|---|---|---|
| BCMA_EBB- | 859 | MALPVTALLLPLALLLHAARPEVQLVESGGGLVQPGGSLRLSCAASGFTFS |
| C1978-G4-aa | | SYAMSWVRQAPGKGLEWVSAISGSGGSTYYADSVKGRFTISRDNSKNTLY |
| Full CART | | LQMNSLRAEDTAVYYCAKMGWSSGYLGAFDIWGQGTTVTVSSGGGGSG |
| | | GGGSGGGGSEIVLTQSPGTLSLSPGERATLSCRASQSVASSFLAWYQQK |
| | | PGQAPRLLIYGASGRATGIPDRFSGSGSGTDFTLTISRLEPEDFAVYYCQH |
| | | YGGSPRLTFGGGTKVDIKTTTPAPRPPTPAPTIASQPLSLRPEACRPAAGG |
| | | AVHTRGLDFACDIYIWAPLAGTCGVLLLSLVITLYCKRGRKKLLYIFKQPFMR |
| | | PVQTTQEEDGCSCRFPEEEEGGCELRVKFSRSADAPAYKQGQNQLYNEL |
| | | NLGRREEYDVLDKRRGRDPEMGGKPRRKNPQEGLYNELQKDKMAEAYS |
| | | EIGMKGERRRGKGHDGLYQGLSTATKDTYDALHMQALPPR |
| BCMA_EBB- | 860 | ATGGCCCTCCCTGTCACCGCCCTGCTGCTTCCGCTGGCTCTTCTGCTC |
| C1978-G4-nt | | CACGCCGCTCGGCCCGAAGTCCAACTGGTGGAGTCCGGGGGAGGGCT |
| Full CART | | CGTGCAGCCCGGAGGCAGCCTTCGGCTGTCGTGCGCCGCCTCCGGGT |
| | | TCACGTTCTCATCCTACGCGATGTCGTGGGTCAGACAGGCACCAGGAA |
| | | AGGGACTGGAATGGGTGTCCGCCATTAGCGGCTCCGGCGGTAGCACC |
| | | TACTATGCCGACTCAGTGAAGGGAAGGTTCACTATCTCCCGCGACAAC |
| | | AGCAAGAACACCCTGTACCTCCAAATGAACTCTCTGCGGGCCGAGGAT |
| | | ACCGCGGTGTACTATTGCGCCAAGATGGGTTGGTCCAGCGGATACTTG |
| | | GGAGCCTTCGACATTTGGGGACAGGGCACTACTGTGACCGTGTCCTCC |
| | | GGGGGTGGCGGATCGGGAGGCGGCGGCTCGGGTGGAGGGGGTTCCG |
| | | AAATCGTGTTGACCCAGTCACCGGGAACCCTCTCGCTGTCCCCGGGAG |
| | | AACGGGCTACACTGTCATGTAGAGCGTCCCAGTCCGTGGCTTCCTCGT |
| | | TCCTGGCCTGGTACCAGCAGAAGCCGGGACAGGCACCCCGCCTGCTC |
| | | ATCTACGGAGCCAGCGGCCGGGCGACCGGCATCCCTGACCGCTTCTC |
| | | CGGTTCCGGCTCGGGCACCGACTTTACTCTGACCATTAGCAGGCTTGA |
| | | GCCCGAGGATTTTGCCGTGTACTACTGCCAACACTACGGGGGGAGCCC |
| | | TCGCCTGACCTTCGGAGGCGGAACTAAGGTCGATATCAAAACCACTAC |
| | | CCCAGCACCGAGGCCACCCACCCCGGCTCCTACCATCGCCTCCCAGC |
| | | CTCTGTCCCTGCGTCCGGAggcatgtagacccgcagctggtggggccgtgcatacccggg |
| | | gtcttgacttcgcctgcgatatctacatttgggcccctctggctggtacttgcggggtcctgctgctttcactcgt |
| | | gatcactctttactgtaagcgcggtcggaagaagctgctgtacatctttaagcaacccttcatgaggcctgt |
| | | gcagactactcaagaggaggacggctgttcatgccggttcccagaggaggaggaaggcggctgcgaa |
| | | ctgcgcgtgaaattcagccgcagcgcagatgctccagcctacaagcaggggcagaaccagctctaca |
| | | acgaactcaatcttggtcggagagaggagtacgacgtgctggacaagcggagaggacgggacccag |
| | | aaatgggcgggaagccgcgcagaaagaatccccaagagggcctgtacaacgagctccaaaaggat |
| | | aagatggcagaagcctatagcgagattggtatgaaaggggaacgcagaagaggcaaaggccacga |
| | | cggactgtaccagggactcagcaccgccaccaaggacacctatgacgctcttcacatgcaggccctgc |
| | | cgcctcgg |

[0541] In one embodiment, the CAR comprises (e.g., consists of) an amino acid sequence provided in Table 16, or Table 1 of WO2016/014565, or as otherwise described herein. In one embodiment, the CAR comprises (e.g., consists of) an amino acid sequence selected from any one of SEQ ID NOs: 789, 791, 793, 795, 797, 799, 801, 803, 805, 807, 809, 811, 813, 815, 817, 819, 821, 823, 825, 827, 829, 831, 833, 835, 837, 839, 841, 843, 845, 847, 849, 851, 853, 855, 857, 859; or an amino acid sequence having at least one, two, three, four, five, 10, 15, 20 or 30 modifications (e.g., substitutions, e.g., conservative substitutions) but not more than 60, 50, or 40 modifications (e.g., substitutions, e.g., conservative substitutions) of an amino acid sequence selected from any one of SEQ ID NOs: 789, 791, 793, 795, 797, 799, 801, 803, 805, 807, 809, 811, 813, 815, 817, 819, 821, 823, 825, 827, 829, 831, 833, 835, 837, 839, 841, 843, 845, 847, 849, 851, 853, 855, 857, 859; or an amino acid sequence having 85%, 90%, 95%, 96%, 97%, 98%, 99% identity to an amino acid sequence selected from any one of SEQ ID NOs: 789, 791, 793, 795, 797, 799, 801, 803, 805, 807, 809, 811, 813, 815, 817, 819, 821, 823, 825, 827, 829, 831, 833, 835, 837, 839, 841, 843, 845, 847, 849, 851, 853, 855, 857, 859.

[0542] In one embodiment, the CAR molecule comprises a mesothelin antigen binding domain (e.g., a murine, human or humanized antibody or antibody fragment that specifically binds to mesothelin), a transmembrane domain, and an intracellular signaling domain (e.g., an intracellular signaling domain comprising a costimulatory domain and/or a primary signaling domain).

[0543] Exemplary CAR molecules that target mesothelin are described herein, and are provided in Table 17. The CAR molecules in Table 17 comprise a mesothelin antigen binding domain, e.g., an amino acid sequence of any mesothelin antigen binding domain provided in Table 3. The leader sequence is in bold and underlined, CDRs are underlined, and the linker sequence between the heavy and light chain of the antigen binding region is shaded in grey.

TABLE 17
Exemplary CAR molecules

| | | SEQ |
|---|---|---|
| | | ID |
| Name | Amino Acid Sequence | NO: |
| M5 CAR | MALPVTALLLPLALLLHAARPQVQLVQSGAEVEKPGASVKVSCKASGYTFTDYY | 724 |
| | MHWVRQAPGQGLEWMGWINPNSGGTNYAQKFQGRVTMTRDTSISTAYMELSRL | |
| | RSDDTAVYYCASGWDFDYWGQGTLVTVSSGGGGSGGGGSGGGGSGGGGSDIV | |
| | MTQSPSSLSASVGDRVTITCRASQSIRYYLSWYQQKPGKAPKLLIYTASILQNGVP | |
| | SRFSGSGSGTDFTLTISSLQPEDFATYYCLQTYTTPDFGPGTKVEIKTTTPAPRPPT | |
| | PAPTIASQPLSLRPEACRPAAGGAVHTRGLDFACDIYIWAPLAGTCGVLLLSLVITL | |
| | YCKRGRKKLLYIFKQPFMRPVQTTQEEDGCSCRFPEEEEGGCELRVKFSRSADAP | |
| | AYKQGQNQLYNELNLGRREEYDVLDKRRGRDPEMGGKPRRKNPQEGLYNELQK | |
| | DKMAEAYSEIGMKGERRRGKGHDGLYQGLSTATKDTYDALHMQALPPR | |
| M11 | MALPVTALLLPLALLLHAARPQVQLQQSGAEVKKPGASVKVSCKASGYTFTGYY | 725 |
| CAR | MHWVRQAPGQGLEWMGWINPNSGGTNYAQNFQGRVTMTRDTSISTAYMELRRL | |
| | RSDDTAVYYCASGWDFDYWGQGTLVTVSSGGGGSGGGGSGGGGSGGGGSDIR | |
| | MTQSPSSLSASVGDRVTITCRASQSIRYYLSWYQQKPGKAPKLLIYTASILQNGVP | |
| | SRFSGSGSGTDFTLTISSLQPEDFATYYCLQTYTTPDFGPGTKVEIKTTTPAPRPPT | |
| | PAPTIASQPLSLRPEACRPAAGGAVHTRGLDFACDIYIWAPLAGTCGVLLLSLVITL | |
| | YCKRGRKKLLYIFKQPFMRPVQTTQEEDGCSCRFPEEEEGGCELRVKFSRSADAP | |
| | AYKQGQNQLYNELNLGRREEYDVLDKRRGRDPEMGGKPRRKNPQEGLYNELQK | |
| | DKMAEAYSEIGMKGERRRGKGHDGLYQGLSTATKDTYDALHMQALPPR | |
| SS1 | MALPVTALLLPLALLLHAARPQVQLQQSGPELEKPGASVKISCKASGYSFTGYTM | 726 |
| CAR | NWVKQSHGKSLEWIGLITPYNGASSYNQKFRGKATLTVDKSSSTAYMDLLSLTSE | |
| | DSAVYFCARGGYDGRGFDYWGQGTTVTVSSGGGGSGGGGSGGGGSDIELTQS | |
| | PAIMSASPGEKVTMTCSASSSVSYMHWYQQKSGTSPKRWIYDTSKLASGVPGRF | |
| | SGSGSGNSYSLTISSVEAEDDATYYCQQWSGYPLTFGAGTKLEITTTPAPRPPTPA | |
| | PTIASQPLSLRPEACRPAAGGAVHTRGLDFACDIYIWAPLAGTCGVLLLSLVITLYC | |
| | KRGRKKLLYIFKQPFMRPVQTTQEEDGCSCRFPEEEEGGCELRVKFSRSADAPA | |
| M1 CAR | MALPVTALLLPLALLLHAARPQVQLQQSGAEVKKPGASVKVSCKASGYTFTGYY | 727 |
| | MHWVRQAPGQGLEWMGRINPNSGGTNYAQKFQGRVTMTRDTSISTAYMELSRL | |
| | RSEDTAVYYCARGRYYGMDVWGQGTMVTVSSGGGGSGGGGSGGGGSGGGGS | |
| | EIVLTQSPATLSLSPGERATISCRASQSVSSNFAWYQQRPGQAPRLLIYDASNRAT | |
| | GIPPRFSGSGSGTDFTLTISSLEPEDFAAYYCHQRSNWLYTFGQGTKVDIKTTTPA | |
| | PRPPTPAPTIASQPLSLRPEACRPAAGGAVHTRGLDFACDIYIWAPLAGTCGVLLL | |
| | SLVITLYCKRGRKKLLYIFKQPFMRPVQTTQEEDGCSCRFPEEEEGGCELRVKFSR | |
| | SADAPAYKQGQNQLYNELNLGRREEYDVLDKRRGRDPEMGGKPRRKNPQEGLY | |
| | NELQKDKMAEAYSEIGMKGERRRGKGHDGLYQGLSTATKDTYDALHMQALPPR | |
| M2 CAR | MALPVTALLLPLALLLHAARPQVQLVQSGAEVKKPGASVKVSCKASGYTFTGYY | 728 |
| | MHWVRQAPGQGLEWMGWINPNSGGTNYAQKFQGRVTMTRDTSISTAYMELSRL | |
| | RSDDTAVYYCARDLRRTVVTPRAYYGMDVWGQGTTVTVSSGGGGSGGGGSGG | |
| | GGSGGGGSDIQLTQSPSTLSASVGDRVTITCQASQDISNSLNWYQQKAGKAPKLLI | |
| | YDASTLETGVPSRFSGSGSGTDFSFTISSLQPEDIATYYCQQHDNLPLTFGQGTKV | |
| | EIKTTTPAPRPPTPAPTIASQPLSLRPEACRPAAGGAVHTRGLDFACDIYIWAPLAG | |
| | TCGVLLLSLVITLYCKRGRKKLLYIFKQPFMRPVQTTQEEDGCSCRFPEEEEGGCE | |
| | LRVKFSRSADAPAYKQGQNQLYNELNLGRREEYDVLDKRRGRDPEMGGKPRRK | |
| | NPQEGLYNELQKDKMAEAYSEIGMKGERRRGKGHDGLYQGLSTATKDTYDALHM | |
| | QALPPR | |
| M3 CAR | MALPVTALLLPLALLLHAARPQVQLVQSGAEVKKPGAPVKVSCKASGYTFTGYY | 729 |
| | MHWVRQAPGQGLEWMGWINPNSGGTNYAQKFQGRVTMTRDTSISTAYMELSRL | |
| | RSDDTAVYYCARGEWDGSYYYDYWGQGTLVTVSSGGGGSGGGGSGGGGSGG | |
| | GGSDIVLTQTPSSLSASVGDRVTITCRASQSINTYLNWYQHKPGKAPKLLIYAASSL | |
| | QSGVPSRFSGSGSGTDFTLTISSLQPEDFATYYCQQSFSPLTFGGGTKLEIKTTTP | |
| | APRPPTPAPTIASQPLSLRPEACRPAAGGAVHTRGLDFACDIYIWAPLAGTCGVLL | |
| | LSLVITLYCKRGRKKLLYIFKQPFMRPVQTTQEEDGCSCRFPEEEEGGCELRVKFS | |
| | RSADAPAYKQGQNQLYNELNLGRREEYDVLDKRRGRDPEMGGKPRRKNPQEGL | |
| | YNELQKDKMAEAYSEIGMKGERRRGKGHDGLYQGLSTATKDTYDALHMQALPPR | |
| M4 CAR | MALPVTALLLPLALLLHAARPQVQLVESGGGLVQPGGSLRLSCAASGFTFSSYW | 730 |
| | MHWVRQVPGKGLVWVSRINTDGSTTTYADSVEGRFTISRDNAKNTLYLQMNSLR | |
| | DDDTAVYYCVGGHWAVWGQGTTVTVSSGGGGSGGGGSGGGGSGGGGSDIQM | |
| | TQSPSTLSASVGDRVTITCRASQSISDRLAWYQQKPGKAPKLLIYKASSLESGVPS | |
| | RFSGSGSGTEFTLTISSLQPDDFAVYYCQQYGHLPMYTFGQGTKVEIKTTTPAPRP | |
| | PTPAPTIASQPLSLRPEACRPAAGGAVHTRGLDFACDIYIWAPLAGTCGVLLLSLVI | |
| | TLYCKRGRKKLLYIFKQPFMRPVQTTQEEDGCSCRFPEEEEGGCELRVKFSRSAD | |
| | APAYKQGQNQLYNELNLGRREEYDVLDKRRGRDPEMGGKPRRKNPQEGLYNEL | |
| | QKDKMAEAYSEIGMKGERRRGKGHDGLYQGLSTATKDTYDALHMQALPPR | |
| M6 CAR | MALPVTALLLPLALLLHAARPQVQLVQSGAEVKKPGASVKVSCKASGYTFTSYY | 731 |
| | MHWVRQAPGQGLEWMGIINPSGGSTSYAQKFQGRVTMTRDTSTSTVYMELSSLR | |
| | SEDTAVYYCARYRLIAVAGDYYYYGMDVWGQGTMVTVSSGGGGSGGGGSGGG | |
| | GSGGGGSDIQMTQSPSSVSASVGDRVTITCRASQGVGRWLAWYQQKPGTAPKL | |
| | LIYAASTLQSGVPSRFSGSGSGTDFTLTINNLQPEDFATYYCQQANSFPLTFGGGT | |
| | RLEIKTTTPAPRPPTPAPTIASQPLSLRPEACRPAAGGAVHTRGLDFACDIYIWAPL | |
| | AGTCGVLLLSLVITLYCKRGRKKLLYIFKQPFMRPVQTTQEEDGCSCRFPEEEEGG | |
| | CELRVKFSRSADAPAYKQGQNQLYNELNLGRREEYDVLDKRRGRDPEMGGKPR | |
| | RKNPQEGLYNELQKDKMAEAYSEIGMKGERRRGKGHDGLYQGLSTATKDTYDAL | |
| | HMQALPPR | |
| M7 CAR | MALPVTALLLPLALLLHAARPQVQLVQSGGGVVQPGRSLRLSCAASGFTFSSYA | 732 |
| | MHWVRQAPGKGLEWVAVISYDGSNKYYADSVKGRFTISRDNSKNTLYLQMNSLR | |
| | AEDTAVYYCARWKVSSSSPAFDYWGQGTLVTVSSGGGGSGGGGSGGGGSGGG | |
| | GSEIVLTQSPATLSLSPGERAILSCRASQSVYTKYLGWYQQKPGQAPRLLIYDAST | |
| | RATGIPDRFSGSGSGTDFTLTINRLEPEDFAVYYCQHYGGSPLITFGQGTRLEIKTT | |
| | TPAPRPPTPAPTIASQPLSLRPEACRPAAGGAVHTRGLDFACDIYIWAPLAGTCGV | |
| | LLLSLVITLYCKRGRKKLLYIFKQPFMRPVQTTQEEDGCSCRFPEEEEGGCELRVK | |
| | FSRSADAPAYKQGQNQLYNELNLGRREEYDVLDKRRGRDPEMGGKPRRKNPQE | |
| | GLYNELQKDKMAEAYSEIGMKGERRRGKGHDGLYQGLSTATKDTYDALHMQALP | |
| | PR | |
| M8 CAR | MALPVTALLLPLALLLHAARPQVQLQQSGAEVKKPGASVKVSCKTSGYPFTGYS | 733 |
| | LHWVRQAPGQGLEWMGWINPNSGGTNYAQKFQGRVTMTRDTSISTAYMELSRL | |
| | RSDDTAVYYCARDHYGGNSLFYWGQGTLVTVSSGGGGSGGGGSGGGGSGGG | |
| | GSDIQLTQSPSSISASVGDTVSITCRASQDSGTWLAWYQQKPGKAPNLLMYDAST | |
| | LEDGVPSRFSGSASGTEFTLTVNRLQPEDSATYYCQQYNSYPLTFGGGTKVDIKT | |
| | TTPAPRPPTPAPTIASQPLSLRPEACRPAAGGAVHTRGLDFACDIYIWAPLAGTCG | |
| | VLLLSLVITLYCKRGRKKLLYIFKQPFMRPVQTTQEEDGCSCRFPEEEEGGCELRV | |
| | KFSRSADAPAYKQGQNQLYNELNLGRREEYDVLDKRRGRDPEMGGKPRRKNPQ | |
| | EGLYNELQKDKMAEAYSEIGMKGERRRGKGHDGLYQGLSTATKDTYDALHMQAL | |
| | PPR | |
| M9 CAR | MALPVTALLLPLALLLHAARPQVQLVQSGAEVKKPGASVEVSCKASGYTFTSYY | 734 |
| | MHWVRQAPGQGLEWMGIINPSGGSTGYAQKFQGRVTMTRDTSTSTVHMELSSL | |
| | RSEDTAVYYCARGGYSSSSDAFDIWGQGTMVTVSSGGGGSGGGGSGGGGSGG | |
| | GGSDIQMTQSPPSLSASVGDRVTITCRASQDISSALAWYQQKPGTPPKLLIYDASS | |
| | LESGVPSRFSGSGSGTDFTLTISSLQPEDFATYYCQQFSSYPLTFGGGTRLEIKTT | |
| | TPAPRPPTPAPTIASQPLSLRPEACRPAAGGAVHTRGLDFACDIYIWAPLAGTCGV | |
| | LLLSLVITLYCKRGRKKLLYIFKQPFMRPVQTTQEEDGCSCRFPEEEEGGCELRVK | |
| | FSRSADAPAYKQGQNQLYNELNLGRREEYDVLDKRRGRDPEMGGKPRRKNPQE | |
| | GLYNELQKDKMAEAYSEIGMKGERRRGKGHDGLYQGLSTATKDTYDALHMQALP | |
| | PR | |
| M10 | MALPVTALLLPLALLLHAARPQVQLVQSGAEVKKPGASVKVSCKASGYTFTSYGI | 735 |
| CAR | SWVRQAPGQGLEWMGWISAYNGNTNYAQKLQGRVTMTTDTSTSTAYMELRSLR | |
| | SDDTAVYYCARVAGGIYYYYGMDVWGQGTTITVSSGGGGSGGGGSGGGGSGG | |
| | GGSDIVMTQTPDSLAVSLGERATISCKSSHSVLYNRNNKNYLAWYQQKPGQPPKL | |
| | LFYWASTRKSGVPDRFSGSGSGTDFTLTISSLQPEDFATYFCQQTQTFPLTFGQG | |
| | TRLEINTTTPAPRPPTPAPTIASQPLSLRPEACRPAAGGAVHTRGLDFACDIYIWAP | |
| | LAGTCGVLLLSLVITLYCKRGRKKLLYIFKQPFMRPVQTTQEEDGCSCRFPEEEEG | |
| | GCELRVKFSRSADAPAYKQGQNQLYNELNLGRREEYDVLDKRRGRDPEMGGKP | |
| | RRKNPQEGLYNELQKDKMAEAYSEIGMKGERRRGKGHDGLYQGLSTATKDTYDA | |
| | LHMQALPPR | |
| M12 | MALPVTALLLPLALLLHAARPQVQLVQSGAEVKKPGASVKVSCKASGYTFTGYY | 736 |
| CAR | MHWVRQAPGQGLEWMGRINPNSGGTNYAQKFQGRVTMTTDTSTSTAYMELRSL | |
| | RSDDTAVYYCARTTTSYAFDIWGQGTMVTVSSGGGGSGGGGSGGGGSGGGGS | |
| | DIQLTQSPSTLSASVGDRVTITCRASQSISTWLAWYQQKPGKAPNLLIYKASTLESG | |
| | VPSRFSGSGSGTEFTLTISSLQPDDFATYYCQQYNTYSPYTFGQGTKLEIKTTTPA | |
| | PRPPTPAPTIASQPLSLRPEACRPAAGGAVHTRGLDFACDIYIWAPLAGTCGVLLL | |
| | SLVITLYCKRGRKKLLYIFKQPFMRPVQTTQEEDGCSCRFPEEEEGGCELRVKFSR | |
| | SADAPAYKQGQNQLYNELNLGRREEYDVLDKRRGRDPEMGGKPRRKNPQEGLY | |
| | NELQKDKMAEAYSEIGMKGERRRGKGHDGLYQGLSTATKDTYDALHMQALPPR | |
| M13 | MALPVTALLLPLALLLHAARPQVQLVQSGGGLVKPGGSLRLSCEASGFIFSDYYM | 737 |
| CAR | GWIRQAPGKGLEWVSYIGRSGSSMYYADSVKGRFTFSRDNAKNSLYLQMNSLRA | |
| | EDTAVYYCAASPVVAATEDFQHWGQGTLVTVSSGGGGSGGGGSGGGGSGGGG | |
| | SDIVMTQTPATLSLSPGERATLSCRASQSVTSNYLAWYQQKPGQAPRLLLFGAST | |
| | RATGIPDRFSGSGSGTDFTLTINRLEPEDFAMYYCQQYGSAPVTFGQGTKLEIKTT | |
| | TPAPRPPTPAPTIASQPLSLRPEACRPAAGGAVHTRGLDFACDIYIWAPLAGTCGV | |
| | LLLSLVITLYCKRGRKKLLYIFKQPFMRPVQTTQEEDGCSCRFPEEEEGGCELRVK | |
| | FSRSADAPAYKQGQNQLYNELNLGRREEYDVLDKRRGRDPEMGGKPRRKNPQE | |
| | GLYNELQKDKMAEAYSEIGMKGERRRGKGHDGLYQGLSTATKDTYDALHMQALP | |
| | PR | |
| M14 | MALPVTALLLPLALLLHAARPQVQLVQSGAEVRAPGASVKISCKASGFTFRGYYI | 738 |
| CAR | HWVRQAPGQGLEWMGIINPSGGSRAYAQKFQGRVTMTRDTSTSTVYMELSSLRS | |
| | DDTAMYYCARTASCGGDCYYLDYWGQGTLVTVSSGGGGSGGGGSGGGGSGG | |
| | GGSDIQMTQSPPTLSASVGDRVTITCRASENVNIWLAWYQQKPGKAPKLLIYKSSS | |
| | LASGVPSRFSGSGSGAEFTLTISSLQPDDFATYYCQQYQSYPLTFGGGTKVDIKTT | |
| | TPAPRPPTPAPTIASQPLSLRPEACRPAAGGAVHTRGLDFACDIYIWAPLAGTCGV | |
| | LLLSLVITLYCKRGRKKLLYIFKQPFMRPVQTTQEEDGCSCRFPEEEEGGCELRVK | |
| | FSRSADAPAYKQGQNQLYNELNLGRREEYDVLDKRRGRDPEMGGKPRRKNPQE | |
| | GLYNELQKDKMAEAYSEIGMKGERRRGKGHDGLYQGLSTATKDTYDALHMQALP | |
| | PR | |
| M15 | MALPVTALLLPLALLLHAARPQVQLVQSGGGLVQPGRSLRLSCAASGFTFDDYA | 739 |
| CAR | MHWVRQAPGKGLEWVSGISWNSGSIGYADSVKGRFTISRDNAKNSLYLQMNSLR | |
| | AEDTAVYYCAKDGSSSWSWGYFDYWGQGTLVTVSSGGGGSGGGGSGGGGSS | |
| | SELTQDPAVSVALGQTVRTTCQGDALRSYYASWYQQKPGQAPMLVIYGKNNRPS | |
| | GIPDRFSGSDSGDTASLTITGAQAEDEADYYCNSRDSSGYPVFGTGTKVTVLTTTP | |
| | APRPPTPAPTIASQPLSLRPEACRPAAGGAVHTRGLDFACDIYIWAPLAGTCGVLL | |
| | LSLVITLYCKRGRKKLLYIFKQPFMRPVQTTQEEDGCSCRFPEEEEGGCELRVKFS | |
| | RSADAPAYKQGQNQLYNELNLGRREEYDVLDKRRGRDPEMGGKPRRKNPQEGL | |
| | YNELQKDKMAEAYSEIGMKGERRRGKGHDGLYQGLSTATKDTYDALHMQALPPR | |
| M16 | MALPVTALLLPLALLLHAARPEVQLVESGGGLVQPGRSLRLSCAASGFTFDDYA | 740 |
| CAR | MHWVRQAPGKGLEWVSGISWNSGSTGYADSVKGRFTISRDNAKNSLYLQMNSL | |
| | RAEDTALYYCAKDSSSWYGGGSAFDIWGQGTMVTVSSGGGGSGGGGSGGGGS | |
| | SSELTQEPAVSVALGQTVRITCQGDSLRSYYASWYQQKPGQAPVLVIFGRSRRPS | |
| | GIPDRFSGSSSGNTASLIITGAQAEDEADYYCNSRDNTANHYVFGTGTKLTVLTTT | |
| | PAPRPPTPAPTIASQPLSLRPEACRPAAGGAVHTRGLDFACDIYIWAPLAGTCGVL | |
| | LLSLVITLYCKRGRKKLLYIFKQPFMRPVQTTQEEDGCSCRFPEEEEGGCELRVKF | |
| | SRSADAPAYKQGQNQLYNELNLGRREEYDVLDKRRGRDPEMGGKPRRKNPQEG | |
| | LYNELQKDKMAEAYSEIGMKGERRRGKGHDGLYQGLSTATKDTYDALHMQALPP | |
| | R | |
| M17 | MALPVTALLLPLALLLHAARPEVQLVESGGGLVQPGRSLRLSCAASGFTFDDYA | 741 |
| CAR | MHWVRQAPGKGLEWVSGISWNSGSTGYADSVKGRFTISRDNAKNSLYLQMNSL | |
| | RAEDTALYYCAKDSSSWYGGGSAFDIWGQGTMVTVSSGGGGSGGGGSGGGGS | |
| | SSELTQDPAVSVALGQTVRITCQGDSLRSYYASWYQQKPGQAPVLVIYGKNNRPS | |
| | GIPDRFSGSSSGNTASLTITGAQAEDEADYYCNSRGSSGNHYVFGTGTKVTVLTT | |
| | TPAPRPPTPAPTIASQPLSLRPEACRPAAGGAVHTRGLDFACDIYIWAPLAGTCGV | |
| | LLLSLVITLYCKRGRKKLLYIFKQPFMRPVQTTQEEDGCSCRFPEEEEGGCELRVK | |
| | FSRSADAPAYKQGQNQLYNELNLGRREEYDVLDKRRGRDPEMGGKPRRKNPQE | |
| | GLYNELQKDKMAEAYSEIGMKGERRRGKGHDGLYQGLSTATKDTYDALHMQALP | |
| | PR | |
| M18 | MALPVTALLLPLALLLHAARPQVQLVQSGGGLVQPGGSLRLSCAASGFTFSSYW | 742 |
| CAR | MHWVRQAPGKGLVWVSRINSDGSSTSYADSVKGRFTISRDNAKNTLYLQMNSLR | |
| | AEDTAVYYCVRTGWVGSYYYYMDVWGKGTTVTVSSGGGGSGGGGSGGGGSG | |
| | GGGSEIVLTQSPGTLSLSPGERATLSCRASQSVSSNYLAWYQQKPGQPPRLLIYD | |
| | VSTRATGIPARFSGGGSGTDFTLTISSLEPEDFAVYYCQQRSNWPPWTFGQGTKV | |
| | EIKTTTPAPRPPTPAPTIASQPLSLRPEACRPAAGGAVHTRGLDFACDIYIWAPLAG | |
| | TCGVLLLSLVITLYCKRGRKKLLYIFKQPFMRPVQTTQEEDGCSCRFPEEEEGGCE | |
| | LRVKFSRSADAPAYKQGQNQLYNELNLGRREEYDVLDKRRGRDPEMGGKPRRK | |
| | NPQEGLYNELQKDKMAEAYSEIGMKGERRRGKGHDGLYQGLSTATKDTYDALHM | |
| | QALPPR | |
| M19 | MALPVTALLLPLALLLHAARPQVQLVQSGGGVVQPGRSLRLSCAASGFTFSSYG | 743 |
| CAR | MHWVRQAPGKGLEWVAVISYDGSNKYYADSVKGRFTISRDNSKNTLYLQMNSLR | |
| | AEDTAVYYCAKGYSRYYYYGMDVWGQGTTVTVSSGGGGSGGGGSGGGGSGG | |
| | GGSEIVMTQSPATLSLSPGERAILSCRASQSVYTKYLGWYQQKPGQAPRLLIYDAS | |
| | TRATGIPDRFSGSGSGTDFTLTINRLEPEDFAVYYCQHYGGSPLITFGQGTKVDIKT | |
| | TTPAPRPPTPAPTIASQPLSLRPEACRPAAGGAVHTRGLDFACDIYIWAPLAGTCG | |
| | VLLLSLVITLYCKRGRKKLLYIFKQPFMRPVQTTQEEDGCSCRFPEEEEGGCELRV | |
| | KFSRSADAPAYKQGQNQLYNELNLGRREEYDVLDKRRGRDPEMGGKPRRKNPQ | |
| | EGLYNELQKDKMAEAYSEIGMKGERRRGKGHDGLYQGLSTATKDTYDALHMQAL | |
| | PPR | |
| M20 | MALPVTALLLPLALLLHAARPQVQLVQSGGGLVQPGGSLRLSCAASGFTFSSYA | 744 |
| CAR | MSWVRQAPGKGLEWVSAISGSGGSTYYADSVKGRFTISRDNSKNTLYLQMNSLR | |
| | AEDTAVYYCAKREAAAGHDWYFDLWGRGTLVTVSSGGGGSGGGGSGGGGSGG | |
| | GGSDIRVTQSPSSLSASVGDRVTITCRASQSISSYLNWYQQKPGKAPKLLIYAASS | |
| | LQSGVPSRFSGSGSGTDFTLTISSLQPEDFATYYCQQSYSIPLTFGQGTKVEIKTTT | |
| | PAPRPPTPAPTIASQPLSLRPEACRPAAGGAVHTRGLDFACDIYIWAPLAGTCGVL | |
| | LLSLVITLYCKRGRKKLLYIFKQPFMRPVQTTQEEDGCSCRFPEEEEGGCELRVKF | |
| | SRSADAPAYKQGQNQLYNELNLGRREEYDVLDKRRGRDPEMGGKPRRKNPQEG | |
| | LYNELQKDKMAEAYSEIGMKGERRRGKGHDGLYQGLSTATKDTYDALHMQALPP | |
| | R | |
| M21 | MALPVTALLLPLALLLHAARPQVQLVQSWAEVKKPGASVKVSCKASGYTFTSYY | 745 |
| CAR | MHWVRQAPGQGLEWMGIINPSGGSTSYAQKFQGRVTMTRDTSTSTVYMELSNL | |
| | RSEDTAVYYCARSPRVTTGYFDYWGQGTLVTVSSGGGGSGGGGSGGGGSGGG | |
| | GSDIQLTQSPSTLSASVGDRVTITCRASQSISSWLAWYQQKPGKAPKLLIYKASSL | |
| | ESGVPSRFSGSGSGTEFTLTISSLQPDDFATYYCQQYSSYPLTFGGGTRLEIKTTT | |
| | PAPRPPTPAPTIASQPLSLRPEACRPAAGGAVHTRGLDFACDIYIWAPLAGTCGVL | |
| | LLSLVITLYCKRGRKKLLYIFKQPFMRPVQTTQEEDGCSCRFPEEEEGGCELRVKF | |
| | SRSADAPAYKQGQNQLYNELNLGRREEYDVLDKRRGRDPEMGGKPRRKNPQEG | |
| | LYNELQKDKMAEAYSEIGMKGERRRGKGHDGLYQGLSTATKDTYDALHMQALPP | |
| | R | |
| M22 | MALPVTALLLPLALLLHAARPQVQLVQSGAEVRRPGASVKISCRASGDTSTRHYI | 746 |
| CAR | HWLRQAPGQGPEWMGVINPTTGPATGSPAYAQMLQGRVTMTRDTSTRTVYMEL | |
| | RSLRFEDTAVYYCARSVVGRSAPYYFDYWGQGTLVTVSSGGGGSGGGGSGGG | |
| | GSGGGGSDIQMTQSPSSLSASVGDRVTITCRASQGISDYSAWYQQKPGKAPKLLI | |
| | YAASTLQSGVPSRFSGSGSGTDFTLTISYLQSEDFATYYCQQYYSYPLTFGGGTK | |
| | VDIKTTTPAPRPPTPAPTIASQPLSLRPEACRPAAGGAVHTRGLDFACDIYIWAPLA | |
| | GTCGVLLLSLVITLYCKRGRKKLLYIFKQPFMRPVQTTQEEDGCSCRFPEEEEGGC | |
| | ELRVKFSRSADAPAYKQGQNQLYNELNLGRREEYDVLDKRRGRDPEMGGKPRR | |
| | KNPQEGLYNELQKDKMAEAYSEIGMKGERRRGKGHDGLYQGLSTATKDTYDALH | |
| | MQALPPR | |
| M23 | MALPVTALLLPLALLLHAARPQVQLQQSGAEVKKPGASVKVSCKASGYTFTNYY | 747 |
| CAR | MHWVRQAPGQGLEWMGIINPSGGYTTYAQKFQGRLTMTRDTSTSTVYMELSSLR | |
| | SEDTAVYYCARIRSCGGDCYYFDNWGQGTLVTVSSGGGGSGGGGSGGGGSGG | |
| | GGSDIQLTQSPSTLSASVGDRVTITCRASENVNIWLAWYQQKPGKAPKLLIYKSSS | |
| | LASGVPSRFSGSGSGAEFTLTISSLQPDDFATYYCQQYQSYPLTFGGGTKVDIKTT | |
| | TPAPRPPTPAPTIASQPLSLRPEACRPAAGGAVHTRGLDFACDIYIWAPLAGTCGV | |
| | LLLSLVITLYCKRGRKKLLYIFKQPFMRPVQTTQEEDGCSCRFPEEEEGGCELRVK | |
| | FSRSADAPAYKQGQNQLYNELNLGRREEYDVLDKRRGRDPEMGGKPRRKNPQE | |
| | GLYNELQKDKMAEAYSEIGMKGERRRGKGHDGLYQGLSTATKDTYDALHMQALP | |
| | PR | |
| M24 | MALPVTALLLPLALLLHAARPQITLKESGPALVKPTQLTLTCTFSGFSLSTAGVH | 748 |
| CAR | VGWIRQPPGKALEWLALISWADDKRYRPSLRSRLDITRVTSKDQVVLSMTNMQPE | |
| | DTATYYCALQGFDGYEANWGPGTLVTVSSGGGGSGGGGSGGGGSGGGGSDIV | |
| | MTQSPSSLSASAGDRVTITCRASRGISSALAWYQQKPGKPPKLLIYDASSLESGVP | |
| | SRFSGSGSGTDFTLTIDSLEPEDFATYYCQQSYSTPWTFGQGTKVDIKTTTPAPRP | |
| | PTPAPTIASQPLSLRPEACRPAAGGAVHTRGLDFACDIYIWAPLAGTCGVLLLSLVI | |
| | TLYCKRGRKKLLYIFKQPFMRPVQTTQEEDGCSCRFPEEEEGGCELRVKFSRSAD | |
| | APAYKQGQNQLYNELNLGRREEYDVLDKRRGRDPEMGGKPRRKNPQEGLYNEL | |
| | QKDKMAEAYSEIGMKGERRRGKGHDGLYQGLSTATKDTYDALHMQALPPR | |

[0544] In one embodiment, a CAR molecule that binds mesothelin, comprises (e.g., consists of) an amino acid sequence as provided in Table 17, or Table 2 of International Publication No. WO2015/090230, filed Dec. 19, 2014; incorporated herein by reference. In one embodiment, the CAR molecule comprises (e.g., consists of) an amino acid sequence selected from any one of SEQ ID NOs: 724-748; or an amino acid sequence having at least one, two, three, four, five, 10, 15, 20 or 30 modifications (e.g., substitutions, e.g., conservative substitutions) but not more than 60, 50, or 40 modifications (e.g., substitutions, e.g., conservative substitutions) of an amino acid sequence selected from any one of SEQ ID NOs: 724-748; or an amino acid sequence having 85%, 90%, 95%, 96%, 97%, 98%, 99% identity to an amino acid sequence selected from any one of SEQ ID NOs: 724-748.

[0545] In one embodiment, the CAR molecule comprises an EGFRvIII antigen binding domain (e.g., a murine, human or humanized antibody or antibody fragment that specifically binds to EGFRvIII), a transmembrane domain, and an intracellular signaling domain (e.g., an intracellular signaling domain comprising a costimulatory domain and/or a primary signaling domain).

[0546] Exemplary CAR molecules that target EGFRvIII are described herein, and are provided in Table 18, or in Table 2 of WO/2014/130657 or as described in WO2016/014789.

TABLE 18
Exemplary Humanized CAR Constructs. Sequences are provided with a leader, and
the CDRs are underlined. Nt stands for nucleic acid and aa stands for amino acid

| | | |
|---|---|---|
| Name | SEQ ID NO: | Sequence |

CAR 1

| | | |
|---|---|---|
| CAR 1- | 769 | atggccctccctgtcaccgccctgctgcttccgctggctcttctgctccacgccgctcggcccgagatc |
| Full-nt | | cagctggtgcagtcgggagctgaagtcaaaaagcctggcgcaaccgtcaagatctcgtgcaaag |
| | | gatcagggttcaacatcgaggactactacatccattgggtgcaacaggcacccggaaaaggcctg |
| | | gagtggatggggaggattgacccagaaaatgacgaaaccaagtacggaccgatcttccaagga |
| | | cgggtgaccatcacggctgacacttccactaacaccgtctacatggaactctcgagccttcgctcgg |
| | | aagataccgcggtgtactactgcgcctttagaggtggagtctactggggacaagggactaccgtca |
| | | ccgtgtcgtcaggtggcggaggatcaggcggaggcggctccggtggaggaggaagcggagga |
| | | ggtggctccgacgtggtgatgacgcagtcaccggactccttggcggtgagcctgggtgaacgcgcc |
| | | actatcaactgcaagagctcccagagcttgctggactccgatggaaagacttatctcaattggctgca |
| | | acagaagcctggccagccgccaaagagactcatctcactggtgagcaagctggatagcggagtg |
| | | ccagatcggttttcgggatcgggctcaggcaccgacttcaccctgactatttcctccctccaagccga |
| | | ggatgtggccgtctactactgttggcaggggactcacttcccggggaccttcggtggaggcactaag |
| | | gtggagatcaaaaccactaccccagcaccgaggccacccaccccggctcctaccatcgcctccc |
| | | agcctctgtccctgcgtccggaggcatgtagacccgcagctggtggggccgtgcatacccggggtc |
| | | ttgacttcgcctgcgatatctacatttgggcccctctggctggtacttgcggggtcctgctgctttcactcg |
| | | tgatcactctttactgtaagcgcggtcggaagaagctgctgtacatctttaagcaacccttcatgaggc |
| | | ctgtgcagactactcaagaggaggacggctgttcatgccggttcccagaggaggaggaaggcgg |
| | | ctgcgaactgcgcgtgaaattcagccgcagcgcagatgctccagcctacaagcaggggcagaac |
| | | cagctctacaacgaactcaatcttggtcggagagaggagtacgacgtgctggacaagcggagag |
| | | gacgggacccagaaatgggcgggaagccgcgcagaaagaatccccaagagggcctgtacaa |
| | | cgagctccaaaaggataagatggcagaagcctatagcgagattggtatgaaaggggaacgcag |
| | | aagaggcaaaggccacgacggactgtaccagggactcagcaccgccaccaaggacacctatg |
| | | acgctcttcacatgcaggccctgccgcctcgg |
| CAR 1- | 770 | malpvtalllplalllhaarpeiqlvqsgaevkkpgatvkisckgsgfniedyyihwvqqapgkglew |
| Full-aa | | mgridpendetkygpifqgrvtitadtstntvymelsslrsedtavyycafrggvywgqgttvtvss |
| | | ggggsggggsggggsggggsdvvmtqspdslavslgeratinckssqslldsdgktylnwlqq |
| | | kpgqppkrlislvskldsgvpdrfsgsgsgtdftltisslqaedvavyycwqgthfpgtfgggtkveik |
| | | tttpaprpptpaptiasqplslrpeacrpaaggavhtrgldfacdiyiwaplagtcgvlllslvitlyckrgrk |
| | | kllyifkqpfmrpvqttqeedgcscrfpeeeeggcelrvkfsrsadapaykqgqnqlynelnlgrree |
| | | ydvldkrrgrdpemggkprrknpqeglynelqkdkmaeayseigmkgerrrgkghdglyqglsta |
| | | tkdtydalhmqalppr |

CAR 2

| | | |
|---|---|---|
| CAR 2- | 771 | atggccctccctgtcaccgccctgctgcttccgctggctcttctgctccacgccgctcggcccgacgtg |
| Full-nt | | gtcatgactcaaagcccagattccttggctgtctcccttggagaaagagcaacgatcaattgcaaaa |
| | | gctcgcagtccctgttggactccgatggaaaaacctacctcaactggctgcagcagaagccggga |
| | | caaccaccaaagcggctgatttccctcgtgtccaagctggacagcggcgtgccggatcgcttctcgg |
| | | gcagcggctcgggaaccgattttactctcactatttcgtcactgcaagcggaggacgtggcggtgtat |
| | | tactgctggcagggcactcacttcccgggtacttttggtggaggtaccaaagtcgaaatcaagggtg |
| | | gaggcgggagcggaggaggcgggtcgggaggaggaggatcgggtggcggaggctcagaaat |
| | | ccagctggtgcagtcaggtgccgaagtgaagaagcctggggccacggtgaagatctcgtgcaag |
| | | gggagcggattcaacatcgaggattactacatccattgggtgcaacaggcccctggcaaagggct |
| | | ggaatggatgggaaggatcgaccccgagaatgacgagactaagtacggcccgatcttccaagga |
| | | cgggtgaccatcactgcagacacttcaaccaacaccgtctacatggaactctcctcgctgcgctccg |
| | | aggacaccgccgtgtactactgtgctttcagaggaggagtctactggggacagggaacgaccgtg |
| | | accgtcagctcaaccactaccccagcaccgaggccacccaccccggctcctaccatcgcctccca |
| | | gcctctgtccctgcgtccggaggcatgtagacccgcagctggtggggccgtgcatacccggggtctt |
| | | gacttcgcctgcgatatctacatttgggcccctctggctggtacttgcggggtcctgctgctttcactcgt |
| | | gatcactctttactgtaagcgcggtcggaagaagctgctgtacatctttaagcaacccttcatgaggcc |
| | | tgtgcagactactcaagaggaggacggctgttcatgccggttcccagaggaggaggaaggcggct |
| | | gcgaactgcgcgtgaaattcagccgcagcgcagatgctccagcctacaagcaggggcagaacc |
| | | agctctacaacgaactcaatcttggtcggagagaggagtacgacgtgctggacaagcggagagg |
| | | acgggacccagaaatgggcgggaagccgcgcagaaagaatccccaagagggcctgtacaac |
| | | gagctccaaaaggataagatggcagaagcctatagcgagattggtatgaaaggggaacgcaga |
| | | agaggcaaaggccacgacggactgtaccagggactcagcaccgccaccaaggacacctatga |
| | | cgctcttcacatgcaggccctgccgcctcgg |
| CAR 2- | 772 | malpvtalllplalllhaarpdvvmtqspdslavslgeratinckssqslldsdgktylnwlqqkpgq |
| Full-aa | | ppkrlislvskldsgvpdrfsgsgsgtdftltisslqaedvavyycwqgthfpgtfgggtkveikggg |
| | | gsggggsggggsggggseiqlvqsgaevkkpgatvkisckgsgfniedyyihwvqqapgkgle |
| | | wmgridpendetkygpifqgrvtitadtstntvymelsslrsedtavyycafrggvywgqgttvtv |
| | | sstttpaprpptpaptiasqplslrpeacrpaaggavhtrgldfacdiyiwaplagtcgvlllslvitlyckr |
| | | grkkllyifkqpfmrpvqttqeedgcscrfpeeeeggcelrvkfsrsadapaykqgqnqlynelnlgrr |
| | | eeydvldkrrgrdpemggkprrknpqeglynelqkdkmaeayseigmkgerrrgkghdglyqgl |
| | | statkdtydalhmqalppr |

CAR 3

| | | |
|---|---|---|
| CAR 3- | 773 | atggccctccctgtcaccgccctgctgcttccgctggctcttctgctccacgccgctcggcccgaaatc |
| Full-nt | | cagctggtgcaaagcggagccgaggtgaagaagcccggagaatccctgcgcatctcgtgtaagg |
| | | gttccggctttaacatcgaggattactacatccactgggtgagacagatgccgggcaaaggtctgga |
| | | atggatgggccgcatcgacccggagaacgacgaaaccaaatacggaccaatcttccaaggaca |
| | | tgtgactatttccgcggatacctccatcaacactgtctacttgcagtggagctcgctcaaggcgtcgga |
| | | taccgccatgtactactgcgcattcagaggaggtgtgtactggggccagggcactacggtcaccgtg |
| | | tcctcgggaggtggagggtcaggaggcggaggctcgggcggtggaggatcaggcggaggagg |
| | | aagcgatgtggtcatgactcaatccccactgtcactgcctgtcactctggggcaaccggcttccatctc |
| | | atgcaagtcaagccaatcgctgctcgactccgacggaaaaacctacctcaattggcttcagcagcg |
| | | cccaggccagtcgcctcggaggctgatctcactcgtgtcgaagcttgactccggggtgccggatcg |
| | | gtttagcggaagcggatcggggaccgacttcacgttgaagattagccgggtggaagccgaggac |
| | | gtgggagtctattactgctggcaggggacccacttcccggggactttcggaggaggcaccaaagtc |
| | | gagattaagaccactaccccagcaccgaggccacccaccccggctcctaccatcgcctcccagc |
| | | ctctgtccctgcgtccggaggcatgtagacccgcagctggtggggccgtgcatacccggggtcttga |
| | | cttcgcctgcgatatctacatttgggcccctctggctggtacttgcggggtcctgctgctttcactcgtgat |
| | | cactctttactgtaagcgcggtcggaagaagctgctgtacatctttaagcaacccttcatgaggcctgt |
| | | gcagactactcaagaggaggacggctgttcatgccggttcccagaggaggaggaaggcggctgc |
| | | gaactgcgcgtgaaattcagccgcagcgcagatgctccagcctacaagcaggggcagaaccag |
| | | ctctacaacgaactcaatcttggtcggagagaggagtacgacgtgctggacaagcggagaggac |
| | | gggacccagaaatgggcgggaagccgcgcagaaagaatccccaagagggcctgtacaacga |
| | | gctccaaaaggataagatggcagaagcctatagcgagattggtatgaaaggggaacgcagaag |
| | | aggcaaaggccacgacggactgtaccagggactcagcaccgccaccaaggacacctatgacg |
| | | ctcttcacatgcaggccctgccgcctcgg |
| CAR 3- | 774 | malpvtalllplalllhaarpeiqlvqsgaevkkpgeslrisckgsgfniedyyihwvrqmpgkglew |
| Full-aa | | mgridpendetkygpifqghvtisadtsintvylqwsslkasdtamyycafrggvywgqgttvtv |
| | | ssggggsggggsggggsggggsdvvmtqsplslpvtlgqpasisckssqslldsdgktylnwlq |
| | | qrpgqsprrlislvskldsgvpdrfsgsgsgtdftlkisrveaedvgvyycwqgthfpgqtfgggtkvei |
| | | ktttpaprpptpaptiasqplslrpeacrpaaggavhtrgldfacdiyiwaplagtcgvlllslvitlyckrgr |
| | | kkllyifkqpfmrpvqttqeedgcscrfpeeeeggcelrvkfsrsadapaykqgqnqlynelnlgrre |
| | | eydvldkrrgrdpemggkprrknpqeglynelqkdkmaeayseigmkgerrrgkghdglyqglst |
| | | atkdtydalhmqalppr |

CAR 4

| | | |
|---|---|---|
| CAR 4- | 775 | atggccctccctgtcaccgccctgctgcttccgctggctcttctgctccacgccgctcggcccgacgtc |
| Full-nt | | gtcatgacccaatcccctctctccctgccggtcaccctgggtcagccggcgtcgatctcatgcaaaa |
| | | gctcacagtccctgctggattcggacggaaaaacctacttgaactggctccaacagaggccgggtc |
| | | agtcccctcgcagactgatctcgctggtgagcaagctcgactcgggtgtgccggatcggttctccgg |
| | | gtcaggatcgggcaccgactttacgctcaagatttcgagagtggaggccgaggatgtgggagtgta |
| | | ctattgctggcagggcacgcatttccccgggacctttggaggcgggactaaggtggaaatcaaggg |
| | | aggtggcggatcaggcggaggaggcagcggcggaggtggatcaggaggcggagggtcagag |
| | | atccagctggtccaaagcggagcagaggtgaagaagccaggcgagtcccttcgcatttcgtgcaa |
| | | agggagcggcttcaacattgaagattactacatccactgggtgcggcaaatgccaggaaagggtct |
| | | ggaatggatgggacggatcgacccagaaaatgatgaaactaagtacggaccgatcttccaagga |
| | | cacgtcactatctccgcggacacttcgatcaacaccgtgtacctccagtggagcagcttgaaagcct |
| | | ccgacaccgctatgtactactgtgccttccgcggaggagtctactggggacaggggactactgtgac |
| | | cgtgtcgtccaccactaccccagcaccgaggccacccaccccggctcctaccatcgcctcccagc |
| | | ctctgtccctgcgtccggaggcatgtagacccgcagctggtggggccgtgcatacccggggtcttga |
| | | cttcgcctgcgatatctacatttgggcccctctggctggtacttgcggggtcctgctgctttcactcgtgat |
| | | cactctttactgtaagcgcggtcggaagaagctgctgtacatctttaagcaacccttcatgaggcctgt |
| | | gcagactactcaagaggaggacggctgttcatgccggttcccagaggaggaggaaggcggctgc |
| | | gaactgcgcgtgaaattcagccgcagcgcagatgctccagcctacaagcaggggcagaaccag |
| | | ctctacaacgaactcaatcttggtcggagagaggagtacgacgtgctggacaagcggagaggac |
| | | gggacccagaaatgggcgggaagccgcgcagaaagaatccccaagagggcctgtacaacga |
| | | gctccaaaaggataagatggcagaagcctatagcgagattggtatgaaaggggaacgcagaag |
| | | aggcaaaggccacgacggactgtaccagggactcagcaccgccaccaaggacacctatgacg |
| | | ctcttcacatgcaggccctgccgcctcgg |
| CAR 4- | 776 | malpvtalllplalllhaarpdvvmtqsplslpvtlgqpasisckssqslldsdgktylnwlqqrpgqs |
| Full-aa | | prrlislvskldsgvpdrfsgsgsgtdftlkisrveaedvgvyycwqgthfpgtfgggtkveikgggg |
| | | sggggsggggsggggseiqlvqsgaevkkpgeslrisckgsgfniedyyihwvrqmpgkglew |
| | | mgridpendetkygpifqghvtisadtsintvylqwsslkasdtamyycafrggvywgqgttvtv |
| | | sstttpaprpptpaptiasqplslrpeacrpaaggavhtrgldfacdiyiwaplagtcgvlllslvitlyckr |
| | | grkkllyifkqpfmrpvqttqeedgcscrfpeeeeggcelrvkfsrsadapaykqgqnqlynelnlgrr |
| | | eeydvldkrrgrdpemggkprrknpqeglynelqkdkmaeayseigmkgerrrgkghdglyqgl |
| | | statkdtydalhmqalppr |

CAR 5

| | | |
|---|---|---|
| CAR 5- | 777 | atggccctccctgtcaccgccctgctgcttccgctggctcttctgctccacgccgctcggcccgaaatc |
| Full-nt | | cagctcgtgcagagcggagccgaggtcaagaaaccgggtgctaccgtgaagatttcatgcaagg |
| | | gatcgggcttcaacatcgaggattactacatccactgggtgcagcaggcaccaggaaaaggactt |
| | | gaatggatgggccggatcgacccggaaaatgacgagactaagtacggccctatcttccaaggac |
| | | gggtgacgatcaccgcagacactagcaccaacaccgtctatatggaactctcgtccctgaggtccg |
| | | aagatactgccgtgtactactgtgcgtttcgcggaggtgtgtactggggacagggtaccaccgtcac |
| | | cgtgtcatcgggcggtggaggctccggtggaggagggtcaggaggcggtggaagcggaggagg |
| | | cggcagcgacgtggtcatgactcaatcgccgctgtcgctgcccgtcactctgggacaacccgcgtc |
| | | catcagctgcaaatcctcgcagtcactgcttgactccgatggaaagacctacctcaactggctgcag |
| | | caacgcccaggccaatccccaagacgcctgatctcgttggtgtcaaagctggactcaggggtgcc |
| | | ggaccggttctccgggagcgggtcgggcacggatttcactctcaagatctccagagtggaagccg |
| | | aggatgtgggagtctactactgctggcagggaacccatttccctggaacttttggcggaggaactaa |
| | | ggtcgagattaaaaccactaccccagcaccgaggccacccaccccggctcctaccatcgcctccc |
| | | agcctctgtccctgcgtccggaggcatgtagacccgcagctggtggggccgtgcatacccggggtc |
| | | ttgacttcgcctgcgatatctacatttgggcccctctggctggtacttgcggggtcctgctgctttcactcg |
| | | tgatcactctttactgtaagcgcggtcggaagaagctgctgtacatctttaagcaacccttcatgaggc |
| | | ctgtgcagactactcaagaggaggacggctgttcatgccggttcccagaggaggaggaaggcgg |
| | | ctgcgaactgcgcgtgaaattcagccgcagcgcagatgctccagcctacaagcaggggcagaac |
| | | cagctctacaacgaactcaatcttggtcggagagaggagtacgacgtgctggacaagcggagag |
| | | gacgggacccagaaatgggcgggaagccgcgcagaaagaatccccaagagggcctgtacaa |
| | | cgagctccaaaaggataagatggcagaagcctatagcgagattggtatgaaaggggaacgcag |
| | | aagaggcaaaggccacgacggactgtaccagggactcagcaccgccaccaaggacacctatg |
| | | acgctcttcacatgcaggccctgccgcctcgg |
| CAR 5- | 778 | malpvtalllplalllhaarpeiqlvqsgaevkkpgatvkisckgsgfniedyyihwvqqapgkglew |
| Full-aa | | mgridpendetkygpifqgrvtitadtstntvymelsslrsedtavyycafrggvywgqgttvtvss |
| | | ggggsggggsggggsggggsdvvmtqsplslpvtlgqpasisckssqslldsdgktylnwlqqr |
| | | pgqsprrlislvskldsgvpdrfsgsgsgtdftlkisrveaedvgvyycwqgthfpgtfgggtkveikt |
| | | ttpaprpptpaptiasqplslrpeacrpaaggavhtrgldfacdiyiwaplagtcgvlllslvitlyckrgrk |
| | | kllyifkqpfmrpvqttqeedgcscrfpeeeeggcelrvkfsrsadapaykqgqnqlynelnlgrree |
| | | ydvldkrrgrdpemggkprrknpqeglynelqkdkmaeayseigmkgerrrgkghdglyqglsta |
| | | tkdtydalhmqalppr |

CAR 6

| | | |
|---|---|---|
| CAR6- | 779 | atggccctccctgtcaccgccctgctgcttccgctggctcttctgctccacgccgctcggcccgagatt |
| Full-nt | | cagctcgtgcaatcgggagcggaagtcaagaagccaggagagtccttgcggatctcatgcaagg |
| | | gtagcggctttaacatcgaggattactacatccactgggtgaggcagatgccggggaagggactcg |
| | | aatggatgggacggatcgacccagaaaacgacgaaactaagtacggtccgatcttccaaggcca |
| | | tgtgactattagcgccgatacttcaatcaataccgtgtatctgcaatggtcctcattgaaagcctcagat |
| | | accgcgatgtactactgtgctttcagaggaggggtctactggggacagggaactaccgtgactgtct |
| | | cgtccggcggaggcgggtcaggaggtggcggcagcggaggaggagggtccggcggaggtgg |
| | | gtccgacgtcgtgatgacccagagccctgacagcctggcagtgagcctgggcgaaagagctacc |
| | | attaactgcaaatcgtcgcagagcctgctggactcggacggaaaaacgtacctcaattggctgcag |
| | | caaaagcctggccagccaccgaagcgccttatctcactggtgtcgaagctggattcgggagtgccc |
| | | gatcgcttctccggctcgggatcgggtactgacttcaccctcactatctcctcgcttcaagcagaggac |
| | | gtggccgtctactactgctggcagggaacccactttccgggaaccttcggcggagggacgaaagt |
| | | ggagatcaagaccactaccccagcaccgaggccacccaccccggctcctaccatcgcctcccag |
| | | cctctgtccctgcgtccggaggcatgtagacccgcagctggtggggccgtgcatacccggggtcttg |
| | | acttcgcctgcgatatctacatttgggcccctctggctggtacttgcggggtcctgctgctttcactcgtg |
| | | atcactctttactgtaagcgcggtcggaagaagctgctgtacatctttaagcaacccttcatgaggcct |
| | | gtgcagactactcaagaggaggacggctgttcatgccggttcccagaggaggaggaaggcggct |
| | | gcgaactgcgcgtgaaattcagccgcagcgcagatgctccagcctacaagcaggggcagaacc |
| | | agctctacaacgaactcaatcttggtcggagagaggagtacgacgtgctggacaagcggagagg |
| | | acgggacccagaaatgggcgggaagccgcgcagaaagaatccccaagagggcctgtacaac |
| | | gagctccaaaaggataagatggcagaagcctatagcgagattggtatgaaaggggaacgcaga |
| | | agaggcaaaggccacgacggactgtaccagggactcagcaccgccaccaaggacacctatga |
| | | cgctcttcacatgcaggccctgccgcctcgg |
| CAR6- | 780 | malpvtalllplalllhaarpeiqlvqsgaevkkpgeslrisckgsgfniedyyihwvrqmpgkglew |
| Full-aa | | mgridpendetkygpifqghvtisadtsintvylqwsslkasdtamyycafrggvywgqgttvtv |
| | | ssggggsggggsggggsggggsdvvmtqspdslavslgeratinckssqslldsdgktylnwl |
| | | qqkpgqppkrlislvskldsgvpdrfsgsgsgtdftltisslqaedvavyycwqgthfpgtfgggtkv |
| | | eiktttpaprpptpaptiasqplslrpeacrpaaggavhtrgldfacdiyiwaplagtcgvlllslvitlyckr |
| | | grkkllyifkqpfmrpvqttqeedgcscrfpeeeeggcelrvkfsrsadapaykqgqnqlynelnlgrr |
| | | eeydvldkrrgrdpemggkprrknpqeglynelqkdkmaeayseigmkgerrrgkghdglyqgl |
| | | statkdtydalhmqalppr |

CAR 7

| | | |
|---|---|---|
| CAR 7 | 781 | atggccctccctgtcaccgccctgctgcttccgctggctcttctgctccacgccgctcggcccgacgtg |
| Full-nt | | gtgatgactcagtcgcctgactcgctggctgtgtcccttggagagcgggccactatcaattgcaagtc |
| | | atcccagtcgctgctggattccgacgggaaaacctacctcaattggctgcagcaaaaaccgggac |
| | | agcctccaaagcggctcatcagcctggtgtccaagttggacagcggcgtgccagaccgcttctccg |
| | | gttcgggaagcggtactgatttcacgctgaccatctcatccctccaagcggaggatgtggcagtctac |
| | | tactgttggcagggcacgcattttccgggcacttttggaggagggaccaaggtcgaaatcaaggga |
| | | ggaggtggctcgggcggaggaggctcgggaggaggaggatcaggaggcggtggaagcgaga |
| | | ttcaactggtccagagcggcgcagaagtcaagaagccgggtgaatcgctcagaatctcgtgcaaa |
| | | ggatcgggattcaacatcgaggactactacattcactgggtcagacaaatgccgggcaaagggct |
| | | ggaatggatggggaggatcgaccccgaaaacgatgaaaccaagtacggaccaatcttccaagg |
| | | gcacgtgaccatttcggcggacacctcaatcaacactgtgtacctccagtggagctcacttaaggcc |
| | | agcgataccgccatgtactattgcgctttccgcggaggggtgtactggggacagggcactactgtga |
| | | ccgtgtcatccaccactaccccagcaccgaggccacccaccccggctcctaccatcgcctcccag |
| | | cctctgtccctgcgtccggaggcatgtagacccgcagctggtggggccgtgcatacccggggtcttg |
| | | acttcgcctgcgatatctacatttgggcccctctggctggtacttgcggggtcctgctgctttcactcgtg |
| | | atcactctttactgtaagcgcggtcggaagaagctgctgtacatctttaagcaacccttcatgaggcct |
| | | gtgcagactactcaagaggaggacggctgttcatgccggttcccagaggaggaggaaggcggct |
| | | gcgaactgcgcgtgaaattcagccgcagcgcagatgctccagcctacaagcaggggcagaacc |
| | | agctctacaacgaactcaatcttggtcggagagaggagtacgacgtgctggacaagcggagagg |
| | | acgggacccagaaatgggcgggaagccgcgcagaaagaatccccaagagggcctgtacaac |
| | | gagctccaaaaggataagatggcagaagcctatagcgagattggtatgaaaggggaacgcaga |
| | | agaggcaaaggccacgacggactgtaccagggactcagcaccgccaccaaggacacctatga |
| | | cgctcttcacatgcaggccctgccgcctcgg |
| CAR 7 | 782 | malpvtalllplalllhaarpdvvmtqspdslavslgeratinckssqslldsdgktylnwlqqkpgq |
| Full-aa | | ppkrlislvskldsgvpdrfsgsgsgtdftltisslqaedvavyycwqgthfpgtfgggtkveikggg |
| | | gsggggsggggsggggseiqlvqsgaevkkpgeslrisckgsgfniedyyihwvrqmpgkgle |
| | | wmgridpendetkygpifqghvtisadtsintvylqwsslkasdtamyycafrggvywgqgttvt |
| | | vsstttpaprpptpaptiasqplslrpeacrpaaggavhtrgldfacdiyiwaplagtcgvlllslvitlyck |
| | | rgrkkllyifkqpfmrpvqttqeedgcscrfpeeeeggcelrvkfsrsadapaykqgqnqlynelnlgr |
| | | reeydvldkrrgrdpemggkprrknpqeglynelqkdkmaeayseigmkgerrrgkghdglyqgl |
| | | statkdtydalhmqalppr |

CAR 8

| | | |
|---|---|---|
| CAR 8- | 783 | atggccctccctgtcaccgccctgctgcttccgctggctcttctgctccacgccgctcggcccgatgtg |
| Full-nt | | gtcatgacgcagtcaccactgtccctccccgtgacccttggacagccagcgtcgattagctgcaagt |
| | | catcccaatccctgctcgattcggatggaaagacctatctcaactggctgcagcaaagacccggtc |
| | | agagccctaggagactcatctcgttggtgtcaaagctggacagcggagtgccggaccggttttccg |
| | | gttcgggatcggggacggacttcactctgaagatttcacgggtggaagctgaggatgtgggagtgta |
| | | ctactgctggcagggaacccatttccctggcacttttggcggaggaactaaggtcgaaatcaaggg |
| | | aggaggtggctcgggaggaggcggatcgggcggaggcgggagcggcggaggagggtccgaa |
| | | atccaacttgtccagtcaggagccgaagtgaagaaaccgggagccaccgtcaaaatcagctgta |
| | | agggatcgggattcaatatcgaggactactacatccactgggtgcagcaagctccgggcaaagga |
| | | ctggagtggatggggcgcatcgacccagagaacgacgaaaccaaatacggcccgatcttccaa |
| | | gggcgggtgaccatcaccgcggacacctcaactaacactgtgtacatggagctgagctccctgcg |
| | | ctccgaagatactgcagtctactactgcgccttccgcggtggtgtgtactggggacagggcaccact |
| | | gtgactgtcagctcgaccactaccccagcaccgaggccacccaccccggctcctaccatcgcctcc |
| | | cagcctctgtccctgcgtccggaggcatgtagacccgcagctggtggggccgtgcatacccggggt |
| | | cttgacttcgcctgcgatatctacatttgggcccctctggctggtacttgcggggtcctgctgctttcactc |
| | | gtgatcactctttactgtaagcgcggtcggaagaagctgctgtacatctttaagcaacccttcatgagg |
| | | cctgtgcagactactcaagaggaggacggctgttcatgccggttcccagaggaggaggaaggcg |
| | | gctgcgaactgcgcgtgaaattcagccgcagcgcagatgctccagcctacaagcaggggcagaa |
| | | ccagctctacaacgaactcaatcttggtcggagagaggagtacgacgtgctggacaagcggaga |
| | | ggacgggacccagaaatgggcgggaagccgcgcagaaagaatccccaagagggcctgtaca |
| | | acgagctccaaaaggataagatggcagaagcctatagcgagattggtatgaaaggggaacgca |
| | | gaagaggcaaaggccacgacggactgtaccagggactcagcaccgccaccaaggacacctat |
| | | gacgctcttcacatgcaggccctgccgcctcgg |
| CAR 8- | 784 | malpvtalllplalllhaarpdvvmtqsplslpvtlgqpasisckssqslldsdgktylnwlqqrpgqs |
| Full-aa | | prrlislvskldsgvpdrfsgsgsgtdftlkisrveaedvgvyycwqgthfpgtfgggtkveikgggg |
| | | sggggsggggsggggseiqlvqsgaevkkpgatvkisckgsgfniedyyihwvqqapgkglew |
| | | mgridpendetkygpifqgrvtitadtstntvymelsslrsedtavyycafrggvywgqgttvtvss |
| | | tttpaprpptpaptiasqplslrpeacrpaaggavhtrgldfacdiyiwaplagtcgvlllslvitlyckrgrk |
| | | kllyifkqpfmrpvqttqeedgcscrfpeeeeggcelrvkfsrsadapaykqgqnqlynelnlgrree |
| | | ydvldkrrgrdpemggkprrknpqeglynelqkdkmaeayseigmkgerrrgkghdglyqglsta |
| | | tkdtydalhmqalppr |

CAR 9 Mouse anti-EGFRvIII clone 3C10

| | | |
|---|---|---|
| CAR 9- | 785 | atggccctccctgtcaccgccctgctgcttccgctggctcttctgctccacgccgctcggcccgagatc |
| Full-nt | | cagctccaacagagcggagccgaactggtcaaaccgggagcgtcggtgaagttgtcatgcactg |
| | | gatcgggcttcaacatcgaggattactacatccactgggtcaagcaacgcaccgagcaggggctg |
| | | gaatggatcggacggatcgaccccgaaaacgatgaaaccaagtacgggcctatcttccaaggac |
| | | gggccaccattacggctgacacgtcaagcaataccgtctacctccagctttccagcctgacctccga |
| | | ggacactgccgtgtactactgcgccttcagaggaggcgtgtactggggaccaggaaccactttgac |
| | | cgtgtccagcggaggcggtggatcaggaggaggaggctcaggcggtggcggctcgcacatgga |
| | | cgtggtcatgactcagtccccgctgaccctgtcggtggcaattggacagagcgcatccatctcgtgc |
| | | aagagctcacagtcgctgctggattccgacggaaagacttatctgaactggctgctccaaagacca |
| | | gggcaatcaccgaaacgccttatctccctggtgtcgaaactcgactcgggtgtgccggatcggtttac |
| | | cggtagcgggtccggcacggacttcactctccgcatttcgagggtggaagcggaggatctcgggat |
| | | ctactactgttggcagggaacccacttccctgggacttttggaggcggaactaagctggaaatcaag |
| | | accactaccccagcaccgaggccacccaccccggctcctaccatcgcctcccagcctctgtccctg |
| | | cgtccggaggcatgtagacccgcagctggtggggccgtgcatacccggggtcttgacttcgcctgc |
| | | gatatctacatttgggcccctctggctggtacttgcggggtcctgctgctttcactcgtgatcactctttact |
| | | gtaagcgcggtcggaagaagctgctgtacatctttaagcaacccttcatgaggcctgtgcagactac |
| | | tcaagaggaggacggctgttcatgccggttcccagaggaggaggaaggcggctgcgaactgcgc |
| | | gtgaaattcagccgcagcgcagatgctccagcctacaagcaggggcagaaccagctctacaacg |
| | | aactcaatcttggtcggagagaggagtacgacgtgctggacaagcggagaggacgggacccag |
| | | aaatgggcgggaagccgcgcagaaagaatccccaagagggcctgtacaacgagctccaaaag |
| | | gataagatggcagaagcctatagcgagattggtatgaaaggggaacgcagaagaggcaaagg |
| | | ccacgacggactgtaccagggactcagcaccgccaccaaggacacctatgacgctcttcacatgc |
| | | aggccctgccgcctcgg |
| CAR 9- | 786 | malpvtalllplalllhaarpeiqlqqsgaelvkpgasvklsctgsgfniedyyihwvkqrteqglewig |
| Full-aa | | ridpendetkygpifqgratitadtssntvylqlssltsedtavyycafrggvywgpgttltvssgggg |
| | | sggggsggggshmdvvmtqspltlsvaigqsasisckssqslldsdgktylnwllqrpgqspkrli |
| | | slvskldsgvpdrftgsgsgtdftlrisrveaedlgiyycwqgthfpgtfgggtkleiktttpaprpptpa |
| | | ptiasqplslrpeacrpaaggavhtrgldfacdiyiwaplagtcgvlllslvitlyckrgrkkllyifkqpfmr |
| | | pvqttqeedgcscrfpeeeeggcelrvkfsrsadapaykqgqnqlynelnlgrreeydvldkrrgrd |
| | | pemggkprrknpqeglynelqkdkmaeayseigmkgerrrgkghdglyqglstatkdtydalhm |
| | | qalppr |

CAR10 Anti-EGFRvIII clone 139

| | | |
|---|---|---|
| CAR 10 | 787 | atggccctccctgtcaccgccctgctgcttccgctggctcttctgctccacgccgctcggcccgatatcc |
| Full-nt | | aaatgactcagagcccttcatccctgagcgccagcgtcggagacagggtgaccatcacgtgccgg |
| | | gcatcccaaggcattagaaataacttggcgtggtatcagcaaaaaccaggaaaggccccgaagc |
| | | gcctgatctacgcggcctccaaccttcagtcaggagtgccctcgcgcttcaccgggagcggtagcg |
| | | gaactgagtttacccttatcgtgtcgtccctgcagccagaggacttcgcgacctactactgcctccagc |
| | | atcactcgtacccgttgacttcgggaggcggaaccaaggtcgaaatcaaacgcactggctcgacgt |
| | | cagggtccggtaaaccgggatcgggagaaggatcggaagtccaagtgctggagagcggaggc |
| | | ggactcgtgcaacctggcgggtcgctgcggctcagctgtgccgcgtcgggttttactttcagctcgtac |
| | | gctatgtcatgggtgcggcaggctccgggaaaggggctggaatgggtgtccgctatttccggctcgg |
| | | gtggaagcaccaattacgccgactccgtgaagggacgcttcaccatctcacgggataactccaag |
| | | aatactctgtacctccagatgaactcgctgagagccgaggacaccgcagtgtactactgcgcaggg |
| | | tcaagcggctggtccgaatactggggacagggcaccctcgtcactgtcagctccaccactacccca |
| | | gcaccgaggccacccaccccggctcctaccatcgcctcccagcctctgtccctgcgtccggaggca |
| | | tgtagacccgcagctggtggggccgtgcatacccggggtcttgacttcgcctgcgatatctacatttgg |
| | | gcccctctggctggtacttgcggggtcctgctgctttcactcgtgatcactctttactgtaagcgcggtcg |
| | | gaagaagctgctgtacatctttaagcaacccttcatgaggcctgtgcagactactcaagaggagga |
| | | cggctgttcatgccggttcccagaggaggaggaaggcggctgcgaactgcgcgtgaaattcagcc |
| | | gcagcgcagatgctccagcctacaagcaggggcagaaccagctctacaacgaactcaatcttggt |
| | | cggagagaggagtacgacgtgctggacaagcggagaggacgggacccagaaatgggcggga |
| | | agccgcgcagaaagaatccccaagagggcctgtacaacgagctccaaaaggataagatggca |
| | | gaagcctatagcgagattggtatgaaaggggaacgcagaagaggcaaaggccacgacggact |
| | | gtaccagggactcagcaccgccaccaaggacacctatgacgctcttcacatgcaggccctgccgc |
| | | ctcgg |
| CAR 10 | 788 | malpvtalllplalllhaarpdiqmtqspsslsasvgdrvtitcrasqgirnnlawyqqkpgkapkrliya |
| Full-aa | | asnlqsgvpsrftgsgsgteftlivsslqpedfatyyclqhhsypltsgggtkveikrtgstsgsgkpgsg |
| | | egsevqvlesggglvqpggslrlscaasgftfssyamswvrqapgkglewvsaisgsggstnyad |
| | | svkgrftisrdnskntlylqmnslraedtavyycagssgwseywgqgtlvtvsstttpaprpptpapti |
| | | asqplslrpeacrpaaggavhtrgldfacdiyiwaplagtcgvlllslvitlyckrgrkkllyifkqpfmrpv |
| | | qttqeedgcscrfpeeeeggcelrvkfsrsadapaykqgqnqlynelnlgrreeydvldkrrgrdpe |
| | | mggkprrknpqeglynelqkdkmaeayseigmkgerrrgkghdglyqglstatkdtydalhmqal |
| | | ppr |

[0547] In one embodiment, a CAR molecule that binds EGFRvIII comprises (e.g., consists of) an amino acid sequence as provided in Table 18. In one embodiment, the CAR that binds EGFRvIII comprises (e.g., consists of) an amino acid sequence selected from any one of SEQ ID NOs: 770, 772, 774, 776, 778, 780, 782, 784, 786, 788; or an amino acid sequence having at least one, two, three, four, five, 10, 15, 20 or 30 modifications (e.g., substitutions, e.g., conservative substitutions) but not more than 60, 50, or 40 modifications (e.g., substitutions, e.g., conservative substitutions) of an amino acid sequence selected from any one of SEQ ID NOs: 770, 772, 774, 776, 778, 780, 782, 784, 786, 788; or an amino acid sequence having 85%, 90%, 95%, 96%, 97%, 98%, 99% identity to an amino acid sequence selected from any one of SEQ ID NOs: 770, 772, 774, 776, 778, 780, 782, 784, 786, 788.

[0548] In one embodiment, a CAR molecule comprises a CD123 antigen binding domain (e.g., a murine, human or humanized antibody or antibody fragment that specifically binds to CD123), a transmembrane domain, and an intracellular signaling domain (e.g., an intracellular signaling domain comprising a costimulatory domain and/or a primary signaling domain). Exemplary CAR molecules that target CD123 include those provided in Table 19, and those provided in Tables 2, 6 and 9 of WO2016/028896. Other exemplary CAR molecules that target CD123 are described in WO/2014/130635 (e.g., Table 1 of WO/2014/130635). Other exemplary CAR molecules that target CD123 are described in WO/2014/144622.

[0549] In one embodiment, a CAR molecule that binds CD123 comprises (e.g., consists of) an amino acid sequence as provided in Table 19. In one embodiment, the CAR that binds CD123 comprises (e.g., consists of) an amino acid sequence selected from any one of SEQ ID NOs: 750, 755, 760, 765; or an amino acid sequence having at least one, two, three, four, five, 10, 15, 20 or 30 modifications (e.g., substitutions, e.g., conservative substitutions) but not more than 60, 50, or 40 modifications (e.g., substitutions, e.g., conservative substitutions) of an amino acid sequence selected from any one of SEQ ID NOs: 750, 755, 760, 765; or an amino acid sequence having 85%, 90%, 95%, 96%, 97%, 98%, 99% identity to an amino acid sequence selected from any one of SEQ ID NOs: 750, 755, 760, 765.

TABLE 19
Exemplary CAR sequences

| Name | SEQ ID | Sequence |
|---|---|---|
| CAR123-2 | 749 | atggccctccctgtcaccgccctgctgcttccgctggctcttctgctccacgccgctcggccccaagtgcaa |
| NT | | ctcgtccaaagcggagcggaagtcaagaaacccggagcgagcgtgaaagtgtcctgcaaagcctccg |
| | | gctacacctttacgggctactacatgcactgggtgcgccaggcaccaggacagggtcttgaatggatgg |
| | | gatggatcaaccctaattcgggcggaactaactacgcacagaagttccaggggagagtgactctgactc |
| | | gggatacctccatctcaactgtctacatggaactctcccgcttgcggtcagatgatacggcagtgtactact |
| | | gcgcccgcgacatgaatatcctggctaccgtgccgttcgacatctggggacaggggactatggttactgtc |
| | | tcatcgggcggtggaggttcaggaggaggcggctcgggaggcggaggttcggacattcagatgaccca |
| | | gtccccatcctctctgtcggccagcgtcggagatagggtgaccattacctgtcgggcctcgcaaagcatct |
| | | cctcgtacctcaactggtatcagcaaaagccgggaaaggcgcctaagctgctgatctacgccgcttcga |
| | | gcttgcaaagcggggtgccatccagattctcgggatcaggctcaggaaccgacttcaccctgaccgtga |
| | | acagcctccagccggaggactttgccacttactactgccagcagggagactccgtgccgcttactttcggg |
| | | gggggtacccgcctggagatcaagaccactaccccagcaccgaggccacccaccccggctcctacca |
| | | tcgcctcccagcctctgtccctgcgtccggaggcatgtagacccgcagctggtggggccgtgcatacccg |
| | | gggtcttgacttcgcctgcgatatctacatttgggcccctctggctggtacttgcggggtcctgctgctttcactc |
| | | gtgatcactctttactgtaagcgcggtcggaagaagctgctgtacatctttaagcaacccttcatgaggcct |
| | | gtgcagactactcaagaggaggacggctgttcatgccggttcccagaggaggaggaaggcggctgcg |
| | | aactgcgcgtgaaattcagccgcagcgcagatgctccagcctacaagcaggggcagaaccagctcta |
| | | caacgaactcaatcttggtcggagagaggagtacgacgtgctggacaagcggagaggacgggaccc |
| | | agaaatgggcgggaagccgcgcagaaagaatccccaagagggcctgtacaacgagctccaaaagg |
| | | ataagatggcagaagcctatagcgagattggtatgaaaggggaacgcagaagaggcaaaggccacg |
| | | acggactgtaccagggctcagcaccgccaccaaggacacctatgacgctcttcacatgcaggccctg |
| | | ccgcctcgg |
| CAR123-2 | 750 | malpvtalllplalllhaarpqvqlvqsgaevkkpgasvkvsckasgytftgyymhwvrqapgqglewm |
| AA | | gwinpnsggtnyaqkfqgrvtltrdtsistvymelsrlrsddtavyycardmnilatvpfdiwgqgtmvtvss |
| | | ggggsggggsggggsdiqmtqspsslsasvgdrvtitcrasqsissylnwyqqkpgkapklliyaasslq |
| | | sgvpsrfsgsgsgtdftltvnslqpedfatyycqqgdsvpltfgggtrleiktttpaprpptpaptiasqplslrp |
| | | eacrpaaggavhtrgldfacdiyiwaplagtcgvlllslvitlyckrgrkkllyifkqpfmrpvqttqeedgcscrf |
| | | peeeeggcelrvkfsrsadapaykqgqnqlynelnlgrreeydvldkrrgrdpemggkprrknpqegly |
| | | nelqkdkmaeayseigmkgerrrgkghdglyqglstatkdtydalhmqalppr |
| CAR123-2 | 751 | malpvtalllplalllhaarpqvqlvqsgaevkkpgasvkvsckasgytftgyymhwvrqapgqglewm |
| scFv | | gwinpnsggtnyaqkfqgrvtltrdtsistvymelsrlrsddtavyycardmnilatvpfdiwgqgtmvtvss |
| | | ggggsggggsggggsdiqmtqspsslsasvgdrvtitcrasqsissylnwyqqkpgkapklliyaasslq |
| | | sgvpsrfsgsgsgtdftltvnslqpedfatyycqqgdsvpltfgggtrleik |
| CAR123-2 | 752 | QVQLVQSGAEVKKPGASVKVSCKASGYTFTGYYMHWVRQAPGQGLEWM |
| VH | | GWINPNSGGTNYAQKFQGRVTLTRDTSISTVYMELSRLRSDDTAVYYCAR |
| | | DMNILATVPFDIWGQGTMVTVSS |
| CAR123-2 | 753 | DIQMTQSPSSLSASVGDRVTITCRASQSISSYLNWYQQKPGKAPKLLIYAA |
| VL | | SSLQSGVPSRFSGSGSGTDFTLTVNSLOPEDFATYYCQQGDSVPLTFGG |
| | | GTRLEIK |
| CAR123-3 | 754 | atggccctccctgtcaccgccctgctgcttccgctggctcttctgctccacgccgctcggccccaagtccaa |
| NT | | ctcgttcaatccggcgcagaagtcaagaagccaggagcatcagtgaaagtgtcctgcaaagcctcagg |
| | | ctacatcttcacgggatactacatccactgggtgcgccaggctccgggccagggccttgagtggatgggc |
| | | tggatcaaccctaactctgggggaaccaactacgctcagaagttccaggggagggtcactatgactcgc |
| | | gatacctccatctccactgcgtacatggaactctcgggactgagatccgacgatcctgccgtgtactactgc |
| | | gcccgggacatgaacatcttggcgaccgtgccgtttgacatttggggacagggcaccctcgtcactgtgtc |
| | | gagcggtggaggaggctcggggggtggcggatcaggagggggaggaagcgacatccagctgactc |
| | | agagcccatcgtcgttgtccgcgtcggtgggggatagagtgaccattacttgccgcgccagccagagcat |
| | | ctcatcatatctgaattggtaccagcagaagcccggaaaggccccaaaactgctgatctacgctgcaag |
| | | cagcctccaatcgggagtgccgtcacggttctccgggtccggttcgggaactgactttaccctgaccgtga |
| | | attcgctgcaaccggaggatttcgccacgtactactgtcagcaaggagactccgtgccgctgaccttcggt |
| | | ggaggcaccaaggtcgaaatcaagaccactaccccagcaccgaggccacccaccccggctcctacc |
| | | atcgcctcccagcctctgtccctgcgtccggaggcatgtagacccgcagctggtggggccgtgcataccc |
| | | ggggtcttgacttcgcctgcgatatctacatttgggcccctctggctggtacttgcggggtcctgctgctttcac |
| | | tcgtgatcactctttactgtaagcgcggtcggaagaagctgctgtacatctttaagcaacccttcatgaggcc |
| | | tgtgcagactactcaagaggaggacggctgttcatgccggttcccagaggaggaggaaggcggctgcg |
| | | aactgcgcgtgaaattcagccgcagcgcagatgctccagcctacaagcaggggcagaaccagctcta |
| | | caacgaactcaatcttggtcggagagaggagtacgacgtgctggacaagcggagaggacgggaccc |
| | | agaaatgggcgggaagccgcgcagaaagaatccccaagagggcctgtacaacgagctccaaaagg |
| | | ataagatggcagaagcctatagcgagattggtatgaaaggggaacgcagaagaggcaaaggccacg |
| | | acggactgtaccagggactcagcaccgccaccaaggacacctatgacgctcttcacatgcaggccctg |
| | | ccgcctcgg |
| CAR123-3 | 755 | malpvtalllplalllhaarpqvqlvqsgaevkkpgasvkvsckasgyiftgyyihwvrqapgqglewmg |
| AA | | winpnsggtnyaqkfqgrvtmtrdtsistaymelsglrsddpavyycardmnilatvpfdiwgqgtlvtvss |
| | | ggggsggggsggggsdiqltqspsslsasvgdrvtitcrasqsissylnwyqqkpgkapklliyaasslqs |
| | | gvpsrfsgsgsgtdftltvnslqpedfatyycqqgdsvpltfgggtkveiktttpaprpptpaptiasqplslrp |
| | | eacrpaaggavhtrgldfacdiyiwaplagtcgvlllslvitlyckrgrkkllyifkqpfmrpvqttqeedgcscrf |
| | | peeeeggcelrvkfsrsadapaykqgqnqlynelnlgrreeydvldkrrgrdpemggkprrknpqegly |
| | | nelqkdkmaeayseigmkgerrrgkghdglyqglstatkdtydalhmqalppr |
| CAR123-3 | 756 | malpvtalllplalllhaarpqvqlvqsgaevkkpgasvkvsckasgyiftgyyihwvrqapgqglewmg |
| scFv | | winpnsggtnyaqkfqgrvtmtrdtsistaymelsglrsddpavyycardmnilatvpfdiwgqgtlvtvss |
| | | ggggsggggsggggsdiqltqspsslsasvgdrvtitcrasqsissylnwyqqkpgkapklliyaasslqs |
| | | gvpsrfsgsgsgtdftltvnslqpedfatyycqqgdsvpltfgggtkveik |
| CAR123-3 | 757 | QVQLVQSGAEVKKPGASVKVSCKASGYIFTGYYIHWVRQAPGQGLEWMG |
| VH | | WINPNSGGTNYAQKFQGRVTMTRDTSISTAYMELSGLRSDDPAVYYCARD |
| | | MNILATVPFDIWGQGTLVTVSS |
| CAR123-3 | 758 | DIQLTQSPSSLSASVGDRVTITCRASQSISSYLNWYQQKPGKAPKLLIYAAS |
| VL | | SLQSGVPSRFSGSGSGTDFTLTVNSLOPEDFATYYCQQGDSVPLTFGGGT |
| | | KVEIK |
| CAR123-4 | 759 | atggccctccctgtcaccgccctgctgcttccgctggctcttctgctccacgccgctcggccccaagtccaa |
| NT | | ctccaacagtcaggcgcagaagtgaaaaagagcggtgcatcggtgaaagtgtcatgcaaagcctcgg |
| | | gctacaccttcactgactactatatgcactggctgcggcaggcaccgggacagggacttgagtggatgg |
| | | gatggatcaacccgaattcaggggacactaactacgcgcagaagttccaggggagagtgaccctgac |
| | | gagggacacctcaatttcgaccgtctacatggaattgtcgcgcctgagatcggacgatactgctgtgtact |
| | | actgtgcccgcgacatgaacatcctcgcgactgtgccttttgatatctggggacaggggactatggtcacc |
| | | gtttcctccgcttccggtggcggaggctcgggaggccgggcctccggtggaggaggcagcgacatcca |
| | | gatgactcagagcccttcctcgctgagcgcctcagtgggagatcgcgtgaccatcacttgccgggccagc |
| | | cagtccatttcgtcctacctcaattggtaccagcagaagccgggaaaggcgcccaagctcttgatctacg |
| | | ctgcgagctccctgcaaagcggggtgccgagccgattctcgggttccggctcgggaaccgacttcactct |
| | | gaccatctcatccctgcaaccagaggactttgccacctactactgccaacaaggagattctgtcccactga |
| | | cgttcggcggaggaaccaaggtcgaaatcaagaccactaccccagcaccgaggccacccaccccgg |
| | | ctcctaccatcgcctcccagcctctgtccctgcgtccggaggcatgtagacccgcagctggtggggccgtg |
| | | catacccggggtcttgacttcgcctgcgatatctacatttgggcccctctggctggtacttgcggggtcctgct |
| | | gctttcactcgtgatcactctttactgtaagcgcggtcggaagaagctgctgtacatctttaagcaacccttca |
| | | tgaggcctgtgcagactactcaagaggaggacggctgttcatgccggttcccagaggaggaggaaggc |
| | | ggctgcgaactgcgcgtgaaattcagccgcagcgcagatgctccagcctacaagcaggggcagaacc |
| | | agctctacaacgaactcaatcttggtcggagagaggagtacgacgtgctggacaagcggagaggacg |
| | | ggacccagaaatgggcgggaagccgcgcagaaagaatccccaagagggcctgtacaacgagctcc |
| | | aaaaggataagatggcagaagcctatagcgagattggtatgaaaggggaacgcagaagaggcaaa |
| | | ggccacgacggactgtaccagggactcagcaccgccaccaaggacacctatgacgctcttcacatgca |
| | | ggccctgccgcctcgg |
| CAR123-4 | 760 | malpvtalllplalllhaarpqvqlqqsgaevkksgasvkvsckasgytftdyymhwlrqapgqglewmg |
| AA | | winpnsgdtnyaqkfqgrvtltrdtsistvymelsrlrsddtavyycardmnilatvpfdiwgqgtmvtvssa |
| | | sggggsggrasggggsdiqmtqspsslsasvgdrvtitcrasqsissylnwyqqkpgkapklliyaassl |
| | | qsgvpsrfsgsgsgtdftltisslqpedfatyycqqgdsvpltfgggtkveiktttpaprpptpaptiasqplslr |
| | | peacrpaaggavhtrgldfacdiyiwaplagtcgvlllslvitlyck |
| CAR123-4 | 761 | MALPVTALLLPLALLLHAARPQVQLQQSGAEVKKSGASVKVSCKASGYTFT |
| scFv | | DYYMHWLRQAPGQGLEWMGWINPNSGDTNYAQKFQGRVTLTRDTSISTV |
| | | YMELSRLRSDDTAVYYCARDMNILATVPFDIWGQGTMVTVSSASGGGGS |
| | | GGRASGGGGSDIQMTQSPSSLSASVGDRVTITCRASQSISSYLNWYQQKP |
| | | GKAPKLLIYAASSLQSGVPSRFSGSGSGTDFTLTISSLQPEDFATYYCQQG |
| | | DSVPLTFGGGTKVEIK |
| CAR123-4 | 762 | QVQLQQSGAEVKKSGASVKVSCKASGYTFTDYYMHWLRQAPGQGLEWM |
| VH | | GWINPNSGDTNYAQKFQGRVTLTRDTSISTVYMELSRLRSDDTAVYYCAR |
| | | DMNILATVPFDIWGQGTMVTVSS |
| CAR123-4 | 763 | DIQMTQSPSSLSASVGDRVTITCRASQSISSYLNWYQQKPGKAPKLLIYAA |
| VL | | SSLQSGVPSRFSGSGSGTDFTLTISSLQPEDFATYYCQQGDSVPLTFGGG |
| | | TKVEIK |
| CAR123-1 | 764 | atggccctccctgtcaccgccctgctgcttccgctggctcttctgctccacgccgctcggccccaagtccaa |
| NT | | ctcgtccagtcaggagcggaagtcaagaagcccggagcgtcagtcaaagtgtcatgcaaagcctcgg |
| | | gctacactttcactgggtactacatgcactgggtgcgccaggctccaggacagggactggaatggatgg |
| | | gatggatcaacccgaactccggtggcaccaattacgcccagaagttccaggggagggtgaccatgact |
| | | cgcgacacgtcgatcagcaccgcatacatggagctgtcaagactccggtccgacgatactgccgtgtac |
| | | tactgcgcacgggacatgaacattctggccaccgtgccttttgacatctggggtcagggaactatggttacc |
| | | gtgtcctctggtggaggcggctccggcggggggggaagcggaggcggtggaagcgacattcagatga |
| | | cccagtcgccttcatccctttcggcgagcgtgggagatcgcgtcactatcacttgtcgggcctcgcagtcca |
| | | tctccacctacctcaattggtaccagcagaagccaggaaaagcaccgaatctgctgatctacgccgcgtt |
| | | ttccttgcaatcgggagtgccaagcagattcagcggatcgggatcaggcactgatttcaccctcaccatca |
| | | actcgctgcaaccggaggatttcgctacgtactattgccaacaaggagacagcgtgccgctcaccttcgg |
| | | cggagggactaagctggaaatcaagaccactaccccagcaccgaggccacccaccccggctcctac |
| | | catcgcctcccagcctctgtccctgcgtccggaggcatgtagacccgcagctggtggggccgtgcatacc |
| | | cggggtcttgacttcgcctgcgatatctacatttgggcccctctggctggtacttgcggggtcctgctgctttca |
| | | ctcgtgatcactctttactgtaagcgcggtcggaagaagctgctgtacatctttaagcaacccttcatgaggc |
| | | ctgtgcagactactcaagaggaggacggctgttcatgccggttcccagaggaggaggaaggcggctgc |
| | | gaactgcgcgtgaaattcagccgcagcgcagatgctccagcctacaagcaggggcagaaccagctct |
| | | acaacgaactcaatcttggtcggagagaggagtacgacgtgctggacaagcggagaggacgggacc |
| | | cagaaatgggcgggaagccgcgcagaaagaatccccaagagggcctgtacaacgagctccaaaag |
| | | gataagatggcagaagcctatagcgagattggtatgaaaggggaacgcagaagaggcaaaggccac |
| | | gacggactgtaccagggactcagcaccgccaccaaggacacctatgacgctcttcacatgcaggccct |
| | | gccgcctcgg |
| CAR123-1 | 765 | malpvtalllplalllhaarpqvqlvqsgaevkkpgasvkvsckasgytftgyymhwvrqapgqglewm |
| AA | | gwinpnsggtnyaqkfqgrvtmtrdtsistaymelsrlrsddtavyycardmnilatvpfdiwgqgtmvtvs |
| | | sggggsggggsggggsdiqmtqspsslsasvgdrvtitcrasqsistylnwyqqkpgkapnlliyaafslq |
| | | sgvpsrfsgsgsgtdftltinslqpedfatyycqqgdsvpltfgggtkleiktttpaprpptpaptiasqplslrp |
| | | eacrpaaggavhtrgldfacdiyiwaplagtcgvlllslvitlyckrgrkkllyifkqpfmrpvqttqeedgcscrf |
| | | peeeeggcelrvkfsrsadapaykqgqnqlynelnlgrreeydvldkrrgrdpemggkprrknpqegly |
| | | nelqkdkmaeayseigmkgerrrgkghdglyqglstatkdtydalhmqalppr |
| CAR123-1 | 766 | malpvtallIplalllhaarpqvqlvqsgaevkkpgasvkvsckasgytftgyymhwvrqapgqglewm |
| scFv | | gwinpnsggtnyaqkfqgrvtmtrdtsistaymelsrlrsddtavyycardmnilatvpfdiwgqgtmvtvs |
| | | sggggsggggsggggsdiqmtqspsslsasvgdrvtitcrasqsistylnwyqqkpgkapnlliyaafslq |
| | | sgvpsrfsgsgsgtdftltinslqpedfatyycqqgdsvpltfgggtkleik |
| CAR123-1 | 767 | QVQLVQSGAEVKKPGASVKVSCKASGYTFTGYYMHWVRQAPGQGLEWM |
| VH | | GWINPNSGGTNYAQKFQGRVTMTRDTSISTAYMELSRLRSDDTAVYYCAR |
| | | DMNILATVPFDIWGQGTMVTVSS |
| CAR123-1 | 768 | DIQMTQSPSSLSASVGDRVTITCRASQSISTYLNWYQQKPGKAPNLLIYAAF |
| VL | | SLQSGVPSRFSGSGSGTDFTLTINSLQPEDFATYYCQQGDSVPLTFGGGT |
| | | KLEIK |

[0550] In one embodiment, the CAR molecule comprises a CD33 antigen binding domain (e.g., a murine, human or humanized antibody or antibody fragment that specifically binds to CD33), a transmembrane domain, and an intracellular signaling domain (e.g., an intracellular signaling domain comprising a costimulatory domain and/or a primary signaling domain). Exemplary CAR molecules that target CD33 are described herein, and are provided in WO2016/014576, e.g., in Table 2 of WO2016/014576.

[0551] In one embodiment, the CAR molecule comprises a CLL-1 antigen binding domain (e.g., a murine, human or humanized antibody or antibody fragment that specifically binds to CLL-1), a transmembrane domain, and an intracellular signaling domain (e.g., an intracellular signaling domain comprising a costimulatory domain and/or a primary signaling domain). Exemplary CAR molecules that target CLL-1 are described herein, and are provided in WO/2016/014535, e.g., in Table 2 of WO2016/014535.

[0552] Natural Killer Cell Receptor (NKR) CARs

[0553] In an embodiment, the CAR molecule described herein comprises one or more components of a natural killer cell receptor (NKR). The NKR component can be a transmembrane domain, a hinge domain, or a cytoplasmic domain from any of the following natural killer cell receptors: killer cell immunoglobulin-like receptor (KIR), e.g., KIR2DL1, KIR2DL2/L3, KIR2DL4, KIR2DL5A, KIR2DL5B, KIR2DS1, KIR2DS2, KIR2DS3, KIR2DS4, DIR2DS5, KIR3DL1/S1, KIR3DL2, KIR3DL3, KIR2DP1, and KIR3DP1; natural cyotoxicity receptor (NCR), e.g., NKp30, NKp44, NKp46; signaling lymphocyte activation molecule (SLAM) family of immune cell receptors, e.g., CD48, CD229, 2B4, CD84, NTB-A, CRACC, BLAME, and CD2F-10; Fc receptor (FcR), e.g., CD16, and CD64; and Ly49 receptors, e.g., LY49A, LY49C. The CAR molecules comprising components of NKRs described herein may interact with an adaptor molecule or intracellular signaling domain, e.g., DAP12. Exemplary configurations and sequences of CAR molecules comprising NKR components are described in International Publication No. WO2014/145252, the contents of which are hereby incorporated by reference.

[0554] Split CAR

[0555] In some embodiments, a CAR-expressing cell described herein uses a split CAR. The split CAR approach is described in more detail in publications WO2014/055442 and WO2014/055657, incorporated herein by reference. Briefly, a split CAR system comprises a cell expressing a first CAR having a first antigen binding domain and a costimulatory domain (e.g., 41BB), and the cell also expresses a second CAR having a second antigen binding domain and an intracellular signaling domain (e.g., CD3 zeta). When the cell encounters the first antigen, the costimulatory domain is activated, and the cell proliferates. When the cell encounters the second antigen, the intracellular signaling domain is activated and cell-killing activity begins. Thus, the CAR-expressing cell is only fully activated in the presence of both antigens. In embodiments the first antigen binding domain recognizes an antigen described herein, e.g., comprises an antigen binding domain described herein, and the second antigen binding domain recognizes a second antigen described herein.

[0556] Exemplary Characteristics of the Temporally Expressed CARs of the Invention

[0557] In some embodiments, it is beneficial that the antigen binding domain is operably linked to another domain of the CAR, such as the transmembrane domain or the intracellular domain, both described elsewhere herein, for expression in the cell. In one embodiment, a nucleic acid encoding the antigen binding domain is operably linked to a nucleic acid encoding a transmembrane domain and a nucleic acid encoding an intracellular domain.

[0558] Between the antigen binding domain and the transmembrane domain of the CAR, or between the intracellular domain and the transmembrane domain of the CAR, a spacer domain may be incorporated. As used herein, the term “spacer domain” generally means any oligo- or polypeptide that functions to link the transmembrane domain to, either the antigen binding domain or, the intracellular domain in the polypeptide chain. In one embodiment, the spacer domain may comprise up to 300 amino acids, preferably 10 to 100 amino acids and most preferably 25 to 50 amino acids. In another embodiment, a short oligo- or polypeptide linker, preferably between 2 and 10 amino acids in length may form the linkage between the transmembrane domain and the intracellular domain of the CAR. An example of a linker includes a glycine-serine doublet.

[0559] In some embodiments, the CAR further comprises a signal peptide. In one embodiment, the signal peptide comprises a nucleic acid sequence comprising ATGGCCTTACCAGTGACCGCCTTGCTCCTGCCGCTGGCCTTGCTGCTCCACGCCGCCAGGCCG or SEQ ID NO: 3034. In another embodiment, the signal peptide comprises the amino acid sequence comprising MALPVTALLLPLALLLHAARP or SEQ ID NO: 3035.

[0560] In some embodiments, the CAR further comprises a dimerization domain, such a dimerization domain from FKBP or similar molecule. In such an embodiment, the presence of CAR molecules on the surface of the modified T cell is prevented by spontaneous aggregation of the CAR molecules in the cytoplasm or other internal location in the cell.

[0561] In yet another embodiment, the dimerization domain comprises the nucleic acid sequence comprising

CGGGGCGTGCAGGTTGAGACAATTTCCCCAGGAGATGGGCGAACGTTCCC
CAAGCGCGGACAGACATGCGTTGTGCACTACACAGGAATGTTGGAGGACG
GAAAGAAAATGGACAGTTCAAGAGATCGGAACAAACCATTCAAATTCATG
TTGGGAAAACAGGAAGTGATACGGGGCTGGGAAGAGGGTGTAGCGCAAAT
GTCCGTTGGTCAACGAGCAAAACTCACGATAAGTCCCGATTATGCTTACG
GCGCAACCGGTCACCCGGGCATCATACCGCCTCATGCGACTTTGGTCTTT
GATGTGGAGCTGTTGAAACTTGAAACTCGCGGAGTACAGGTTGAAACAAT
ATCACCCGGGGACGGGCGGACTTTTCCGAAGAGAGGTCAGACCTGCGTCG
TCCATTATACCGGTATGCTGGAGGACGGAAAGAAAATGGACAGCTCACGG
GACCGAAATAAACCATTCAAATTTATGTTGGGGAAACAAGAGGTTATCAG
GGGCTGGGAGGAGGGTGTGGCCCAGATGTCTGTCGGTCAGCGCGCGAAAC
TCACAATCTCTCCGGATTATGCGTATGGGGCGACAGGGCATCCGGGAATT
ATCCCTCCCCACGCTACCTTGGTTTTCGATGTTGAGCTTCTGAAGTTGGA
GACCAGAGGAGTTCAAGTGGAGACAATATCTCCTGGGGATGGACGGACGT
TCCCCAAGCGCGGCCAGACCTGTGTAGTCCACTACACAGGGATGCTTGAA
GACGGAAAAAAGATGGATAGCAGTAGAGATCGCAACAAACCATTTAAGTT
CATGCTGGGGAAGCAGGAAGTAATACGCGGCTGGGAGGAAGGCGTGGCAC
AGATGAGTGTTGGTCAACGGGCCAAACTTACTATTTCTCCCGATTATGCG
TATGGAGCCACCGGGCACCCTGGCATTATCCCACCCCATGCCACATTGGT
TTTTGACGTTGAATTGCTTAAATTGGAGACCAGGGGAGTCCAAGTGGAAA
CAATATCACCGGGGGATGGTCGGACTTTTCCTAAAAGGGGCCAAACCTGT
GTAGTCCATTATACCGGAATGCTCGAAGACGGAAAGAAAATGGACTCTTC
TAGAGACCGCAATAAGCCCTTCAAGTTCATGTTGGGTAAGCAAGAGGTGA
TCCGGGGCTGGGAAGAGGGGGTCGCTCAAATGTCCGTCGGTCAGCGAGCT
AAACTGACTATTTCCCCAGACTACGCATATGGAGCGACTGGCCACCCCGG
TATTATTCCTCCCCATGCGACTCTCGTGTTCGACGTAGAACTCTTGAAAT
TGGAAACG or SEQ ID NO: 3015.

[0562] In another such embodiment, the dimerization domain comprises the amino acid sequence comprising

RGVQVETISPGDGRTFPKRGQTCVVHYTGMLEDGKKMDSSRDRNKPFKFM
LGKQEVIRGWEEGVAQMSVGQRAKLTISPDYAYGATGHPGIIPPHATLVF
DVELLKLETRGVQVETISPGDGRTFPKRGQTCVVHYTGMLEDGKKMDSSR
DRNKPFKFMLGKQEVIRGWEEGVAQMSVGQRAKLTISPDYAYGATGHPGI
IPPHATLVFDVELLKLETRGVQVETISPGDGRTFPKRGQTCVVHYTGMLE
DGKKMDSSRDRNKPFKFMLGKQEVIRGWEEGVAQMSVGQRAKLTISPDYA
YGATGHPGIIPPHATLVFDVELLKLETRGVQVETISPGDGRTFPKRGQTC
VVHYTGMLEDGKKMDSSRDRNKPFKFMLGKQEVIRGWEEGVAQMSVGQRA
KLTISPDYAYGATGHPGIIPPHATLVFDVELLKLET or SEQ ID NO:
980 (described elsewhere herein).

[0563] Solubilization of the dimerization domains with a solubilizing agent, administered to the cell or to a mammal comprising the cell, prevents dimerization and allows the construct to egress through the secretory system, where it is processed via furin cleavage to express a functional cell surface CAR.

[0564] In the presence of a solubilizing agent, the CAR molecules are separated and aggregation is prevented. Administration of a solubilizing agent would prevent dimerization or aggregation of the CAR molecules and allow the CAR molecules to be presented on the surface of the T cell. In one embodiment, the furin cleavage site comprises the nucleic acid sequence comprising TCAGCCCGGAACAGGCGGAAGAGA or SEQ ID NO:3016. In another embodiment, the furin cleavage site comprises the amino acid sequence SARNRRKR or SEQ ID NO: 3017.

[0565] Composition

[0566] In one embodiment, the invention includes an isolated nucleic acid sequence comprising a nucleic acid sequence comprising a suicide gene comprising a nucleic acid sequence selected from the group consisting of SEQ ID NOs: 3001-3004; and a nucleic acid sequence encoding a CAR comprising an anti-B cell binding domain, a transmembrane domain, a costimulatory domain and an intracellular signaling domain. In some embodiments, the isolated nucleic acid sequence comprises SEQ ID NO: 3018, 3020, 3024, 3026, 3028 or 3030.

[0567] In one embodiment, the invention includes an isolated polypeptide comprising an amino acid sequence encoded by a suicide gene wherein the amino acid sequence is selected from the group consisting of SEQ ID NOs: 3005-3007; and a CAR comprising an anti-B cell binding domain, a transmembrane domain, a costimulatory domain and an intracellular signaling domain. In some embodiments, the isolated polypeptide comprises an amino acid sequence of SEQ ID NO: 3019, 3021, 3026, 3028, 3030 or 3034.

[0568] In another embodiment, the invention includes an isolated nucleic acid sequence comprising a nucleic acid encoding a dimerization domain; and a CAR comprising an anti-B cell binding domain, a transmembrane domain, a costimulatory domain and an intracellular signaling domain. In some embodiments, the dimerization domain comprises the amino acid sequence of SEQ ID NO: 980. In other embodiments, the isolated nucleic acid sequence comprises SEQ ID NO: 977 or 3032.

[0569] In yet another embodiment, the invention includes an isolated polypeptide comprising a dimerization domain; and a CAR comprising an anti-B cell binding domain, a transmembrane domain, a costimulatory domain and an intracellular signaling domain. In some embodiments, the isolated polypeptide comprises an amino acid sequence of SEQ ID NO: 978 or 3033.

[0570] Signal Peptide

[0571] In certain preferred embodiments, the fusion proteins of the invention further include a signal peptide. Signal peptides are useful if it is desirable to have the protein follow the secretory pathway. In preferred embodiments, this signal peptide will be engineered to be present at the very N-terminus of the fusion protein. Exemplary signal peptides are set forth below:

(SEQ ID NO: 2)
CD8: MALPVTALLLPLALLLHAARP
(SEQ ID NO: 43)
GMCSFR: MLLLVTSLLLCELPHPAFLLIP
(SEQ ID NO: 44)
IL2: MYRMQLLSCIALSLALVTNS
(SEQ ID NO: 45)
IgK chain: MAQVKLQESGTELAKPGAAVK
(SEQ ID NO: 46)
NPC2: MRFLAATFLLLALSTAAQA
(SEQ ID NO: 1114)
LAMB1: MGLLQLLAFSFLALCRARVRA
(SEQ ID NO: 1115)
P3IP1: MLLAWVQAFLVSNMLLAEAYG
(SEQ ID NO: 1116)
DMKN: MKFQGPLACLLLALCLGSGEA
(SEQ ID NO: 1117)
TPA: MDAMKRGLCCVLLLCGAVFVSP
(SEQ ID NO: 1118)
PCSK9: MGTVSSRRSWWPLPLLLLLLLLLGPAGARAQEDED

[0572] KDEL (SEQ ID NO: 47) or KKXX and derivatives at the very C-terminus of the protein of interest can be engineered if the protein of interest is an ER-resident protein. These sequences must be inserted together with the signal peptide.

[0573] Proteins of interest can be engineered to include glycosylation patterns for internalization via mannose-6-phosphate receptor and targeting to the endosomal/lysosomal system. These should be included in the protein of interest itself, if this is a protein resident in that compartment. Consensus for N-glycosylation is Asn-X-Ser/Thr, where X is any aminoacid except proline (Pro), serine (Ser), and threonine (Thr).

[0574] In embodiments where it is desirable to have proteins of interested targeted at the peroxisome, the fusion protein can be engineered to include a C-terminal peroxisomal targeting signal (e.g., PTS1: -SKL).

[0575] Cleavage Sites

[0576] Each fusion protein of the invention includes a cleavage site. The cleavage site can either be self-cleavage sites and/or protease cleavage sites. The cleavage site can be designed to be cleaved by any site-specific protease that is expressed in a cell of interest (either through recombinant expression or endogenous expression) at adequate levels to cleave off the conditional expression domain, e.g., a degradation domain or an aggregation domain. In important aspects of the invention, the protease cleavage site is chosen to correspond to a protease natively (or by virtue of cell engineering) to be present in a cellular compartment relevant to the expression of the protein of interest. I.e., the intracellular trafficking of the protease should overlap or partially overlap with the intracellular trafficking of the protein of interest that contains the conditional expression domain, e.g., a degradation domain or an aggregation domain employed. For example, if the protein of interest is located at the cell surface, the enzyme to cleave it can be added exogenous to the cell.

[0577] If the protein of interest resides in the endosomal/lysosomal system a protease cleavage site for an enzyme resident in those compartments can be used. Such protease/consensus motifs include, e.g.,

Furin: RX(K/R)R consensus motif
PCSK1: RX(K/R)R consensus motif
PCSK5: RX(K/R)R consensus motif
PCSK6: RX(K/R)R consensus motif
PCSK7: RXXX[KR]R consensus motif
Cathepsin B: RRX
(SEQ ID NO: 35)
Granzyme B: I-E-P-D-X
Factor XA: Ile-Glu/Asp-Gly-Arg
(SEQ ID NO: 36)
Enterokinase: Asp-Asp-Asp-Asp-Lys
(SEQ ID NO: 37)
Genenase: Pro-Gly-Ala-Ala-His-Tyr
Sortase: LPXTG/A
(SEQ ID NO: 38)
PreScission protease: Leu-Glu-Val-Phe-Gln-Gly-Pro
(SEQ ID NO: 40)
Thrombin: Leu-Val-Pro-Arg-Gly-Ser
(SEQ ID NO: 41)
TEV protease: E-N-L-Y-F-Q-G
(SEQ ID NO: 42)
Elastase 1 [AGSV]-x

[0578] In some embodiments, the fusion protein described herein includes a furin cleavage site. In some embodiments, the fusion proteins described herein include any one of furin cleavage sites listed in Table 20.

[0579] In some embodiments, the fusion proteins described herein include a furin cleavage site selected from RTKR (SEQ ID NO: 123) or a sequence having at least 90%, 95%, 97%, 98%, or 99% identity thereto; GTGAEDPRPSRKRRSLGDVG (SEQ ID NO: 125) or a sequence having at least 90%, 95%, 97%, 98%, or 99% identity thereto; GTGAEDPRPSRKRR (SEQ ID NO: 127) or a sequence having at least 90%, 95%, 97%, 98%, or 99% identity thereto; LQWLEQQVAKRRTKR (SEQ ID NO: 129) or a sequence having at least 90%, 95%, 97%, 98%, or 99% identity thereto; GTGAEDPRPSRKRRSLGG (SEQ ID NO: 131) or a sequence having at least 90%, 95%, 97%, 98%, or 99% identity thereto; GTGAEDPRPSRKRRSLG (SEQ ID NO: 133) or a sequence having at least 90%, 95%, 97%, 98%, or 99% identity thereto; SLNLTESHNSRKKR (SEQ ID NO: 135) or a sequence having at least 90%, 95%, 97%, 98%, or 99% identity thereto; or CKINGYPKRGRKRR (SEQ ID NO: 137) or a sequence having at least 90%, 95%, 97%, 98%, or 99% identity thereto.

[0580] In some embodiments, the fusion proteins described herein include a furin cleavage site selected from

(SEQ ID NO: 123)
RTKR;
(SEQ ID NO: 125)
GTGAEDPRPSRKRRSLGDVG;
(SEQ ID NO: 127)
GTGAEDPRPSRKRR;
(SEQ ID NO: 129)
LQWLEQQVAKRRTKR;
(SEQ ID NO: 131)
GTGAEDPRPSRKRRSLGG;
(SEQ ID NO: 133)
GTGAEDPRPSRKRRSLG;
(SEQ ID NO: 135)
SLNLTESHNSRKKR;
or
(SEQ ID NO: 137)
CKINGYPKRGRKRR.

[0581] In some embodiments, the fusion proteins described herein include a furin cleavage site selected from GTGAEDPRPSRKRRSLGDVG (SEQ ID NO: 125) or a sequence having at least 90%, 95%, 97%, 98%, or 99% identity thereto, or GTGAEDPRPSRKRR (SEQ ID NO: 127) or a sequence having at least 90%, 95%, 97%, 98%, or 99% identity thereto.

[0582] In some embodiments, the fusion proteins described herein include a furin cleavage site selected from

(SEQ ID NO: 125)
GTGAEDPRPSRKRRSLGDVG
or
(SEQ ID NO: 127)
GTGAEDPRPSRKRR.

[0583] In some embodiments, the fusion proteins described herein include the furin cleavage site of

(SEQ ID NO: 125)
GTGAEDPRPSRKRRSLGDVG.

TABLE 20
Exemplary furin cleavage site

| | Amino acid sequence | Nucleic acid sequence |
|---|---|---|
| Furin cleavage site1 | RTKR (SEQ ID NO: 123) | cgtactaaaaga (SEQ ID NO: 1112) |
| Furin cleavage site2 | GTGAEDPRPSRKRRSLGDVG | ggaaccggcgcggaagacccccggccctccaggaag |
| | (SEQ ID NO: 125) | cgaaggtccctcggagacgtgggt (SEQ ID NO: 126) |
| Furin cleavage site3 | GTGAEDPRPSRKRR | ggaaccggcgcggaagacccccggccctccaggaag |
| | (SEQ ID NO: 127) | cgaagg (SEQ ID NO: 128) |
| Furin cleavage site4 | LQWLEQQVAKRRTKR | ctgcaatggctggagcagcaggtggcgaagcggagaa |
| | (SEQ ID NO: 129) | ctaagcgg (SEQ ID NO: 130) |
| Furin cleavage site5 | GTGAEDPRPSRKRRSLGG | ggcacaggtgccgaggaccctcggccaagccgcaaaa |
| | (SEQ ID NO: 131) | ggaggtcacttggcggc (SEQ ID NO: 132) |
| Furin cleavage site6 | GTGAEDPRPSRKRRSLG | ggaaccggagcagaagatcccagaccaagccggaaa |
| | (SEQ ID NO: 133) | aggcggtccctgggt (SEQ ID NO: 134) |
| Furin cleavage site7 | SLNLTESHNSRKKR | agtctcaatttgactgagtcacacaattccaggaagaaaa |
| | (SEQ ID NO: 135) | gg (SEQ ID NO: 136) |
| Furin cleavage site8 | CKINGYPKRGRKRR | tgcaagatcaacggctaccctaagaggggcagaaagc |
| | (SEQ ID NO: 137) | ggcgg (SEQ ID NO: 138) |

[0584] Conditional Expression Domains

[0585] The fusion protein of the invention can include a conditional expression domain. In some embodiments a conditional expression domain has a first state and a second state, e.g., states of aggregation or conformational states, e.g., states of stabilization/destabilization, or states of folding/misfolding. The first state is associated with, causes, or mediates cell surface expression or extracellular expression of one or more (e.g., all) portions of the fusion protein at a first rate or level and the second state is associated with, causes, or mediates cell surface expression or extracellular expression of one or more (e.g., all) portions of the fusion protein at a second rate or level. In an embodiment, the second state has a level or rate that is greater, e.g., 2, 3, 4, 5, 6, 7, 8, 9, 10, 20, or 30 fold greater, than the rate or level of the first state. In an embodiment one of the states, e.g., the second state, is associated with, maintained by, or caused by the presence of an expression compound. In an embodiment, the presence of the expression compound can be associated with, cause, or mediate a change in a physical property, e.g., the second state is associated with an altered level of the physical property, e.g., presence of the expression compound is associated with, causes, or mediates the transformation of a first state with first value for a physical property to a second state with a second value for a physical property, e.g., wherein the property can comprise molecular weight, stability, absorbance at a preselected wavelength, the ability to interact with another molecule, or solubility. In an embodiment, the presence of the expression compound can be associated with, cause, or mediate the transformation of a first folding state to a second folding state, e.g., from misfolded to more properly folded state, e.g., a first state susceptable to degradation to a second state less susceptable to degradation than the first state; or from a first folding state that has a first level of degradation to a second folding state what has a second, lessor, level of degradation, e.g., in a cell of interest. In an embodiment, the presence of the expression compound can be associated with, cause, or mediate disassociation or disaggregation of a first and a second conditional expression domains, e.g., from a higher order association to a lower order association, e.g., from a dimer to monomers, or from tetramers to lower order structures, e.g., dimers or monomers. In an embodiment, the presence of the expression compound can be associated with, cause, or mediate a change in solubility, e.g., the second state is associated with a higher level of solubility, e.g., presence of the expression compound is associated with, causes, or mediates the transformation of a first state with lower solubility to a second state with higher solubility. In an embodiment, the presence of the expression compound can be associated with, cause, or mediate the transformation of a first state of localization or compartmentalization of one or more or all portions of the fusion protein to a second state of localization or compartmentalization of one or more or all portions of the fusion protein, e.g., from the golgi or ER to another compartment or localization, e.g., the cytosol, a membrane, the cell surface, or extracellular space.

[0586] In an embodiment, the presence of the expression compound can be associated with, cause, or mediate, the transformation from or of a first folding state to a second folding state, e.g., from a misfolded state to a more properly folded state, e.g., a first state susceptable to degradation to a second state less susceptable to degradation than the first state; or from a first folding state that has a first level of degradation to a second folding state that has a second, lessor, level of degradation, e.g., in a cell of interest.

[0587] In an embodiment, one of the states, e.g., the second state, is associated with, causes, or mediates cleavage at the cleavage site. While not wishing to be bound by theory, it is believed, that in some embodiments, cleavage results or is associated with cell surface expression or extracellular expression of one or more (e.g., all) portions of the fusion protein. In an embodiment, absent an expression compound, when expressed in a cell of interest, fusion protein, e.g., a first level, e.g., a large fraction, of the fusion protein, comprising a conditional expression domain is not detectable either on the cell surface or extracellularly, e.g., by steric hinderance of the cleavage by the another entity, e.g., the conditional expression domain. Conversely, in the presence of an expression compound, surface expression and/or extracellular expression of one or more (e.g., all) domains of the fusion protein is transformed to a second level which is higher than the first level, e.g., substantially increased, e.g., by 2, 3, 4, 5, or 10 fold over the first level or increased, e.g., by at least 10, 20, 30, 40, 50, 60, 70, 80, 90, 100, 150, 200, 300, 400, 500, 600, 700, 800, 900, or 1000% over the first level. Thus, in an embodiment, a conditional expression domain is identifiable or characterized by the following characteristics: (1) it is not naturally occurring in the context of the fusion protein, e.g., it is recombinant or engineered; (2) surface expression and/or extracellular expression is regulated co-translationally or post-translationally; (3) the rate of surface expression and/or extracellular expression is substantially increased in the presence of an expression compound.

[0588] In an embodiment, addition of expression compound, e.g., deaggregation compound or stabilization compound, to a plurality of cells, e.g., host cells or cells comprising fusion proteins described herein, causes a transformation of a sub-plurality of cells from the first state to the second state, e.g., states of aggregation or conformational states, e.g., states of stabilization/destabilization, or states of folding/misfolding as described herein. In an embodiment, in the absence of expression compound, e.g., deaggregation compound or stabilization compound, less than 10, 9, 8, 7, 6, 5, 4, 3, 2, or 1% of the cells in the plurality comprise the second state, and greater than or equal to 90, 91, 92, 93, 94, 95, 96, 97, 98, or 99% of the cells in the plurality comprise the first state. In an embodiment, in the presence of expression compound, e.g., deaggregation compound or stabilization compound, greater than or equal to 20, 30, 40, 50, 60, 70, 80, 90, or 95% of the cells in the plurality comprise the second state, and less than 20, 15, 10, 9, 8, 7, 6, 5, 4, 3, 2, or 1% of the cells in the plurality comprise the first state. Determination of the percentages of cells in a plurality comprising a state can be made using methods described throughout the specification, for example, as used in FIG. 4.

[0589] In embodiments, a conditional expression domain is a degradation domain, for example, as described herein. In other embodiments, a conditional expression domain is an aggregation domain, for example as described herein. In an embodiment, a conditional expression domain does not comprise a degradation domain. In an embodiment, a conditional expression domain does not comprise an aggregation domain. In embodiments, the fusion protein comprising the conditional expression domain comprises a transmembrane protein, e.g., a chimeric antigen receptor (CAR), e.g., as described herein. In some embodiments, the conditional expression domain is a degradation domain. In some embodiments, the conditional expression domain is an aggregation domain.

[0590] Aggregation Domains

[0591] In some embodiments, the conditional expression domain is an aggregation domain. Methods of generating aggregation domains that cause intracellular aggregation in the absence of an expression compound, e.g., a deaggregation compound, are known in the art and discussed further below.

[0592] The present disclosure encompasses aggregation domains derived from any naturally occurring protein.

[0593] Preferably, fusion proteins of the invention will include an aggregation domain for which no deaggregation compound is natively expressed or provided in the cell compartments of interest. For example, if the fusion protein is designed for expression in T-cells, it is preferable to select an aggregation domain which is paired with a deaggregation compound that is not naturally present in T-cells. Thus, the aggregation domain, when expressed in the cell of interest, will only be deaggregated in the presence of deaggregation compound. Notably, this property can be engineered by either engineering the aggregation domain to no longer bind a natively expressed/present deaggregation compound (in which case the aggregation domain will only deaggregate in the presence of a synthetic compound) or by expressing the aggregation domain in a compartment where the natively expressed/present ligand does not occur (e.g., the aggregation domain can be derived from a species other than the species in which the fusion protein will be expressed).

[0594] Aggregation domain—deaggregation compound pairs can be derived from any naturally occurring or synthetically developed protein. Deaggregation compounds can be any naturally occurring or synthetic compounds. In certain embodiments, the deaggregation compounds will be existing prescription or over-the-counter medicines. Examples of proteins that can be engineered to possess the properties of an aggregation domain are set forth below along with a corresponding deaggregation compound.

[0595] In one embodiment, the aggregation domain is a dimerization domain, e.g., is derived from an an FKB protein (FKBP). In some embodiments, the aggregation domain comprises an amino acid sequence selected from SEQ ID NO: 975 or a sequence having at least 90%, 95%, 97%, 98%, or 99% identity thereto, or SEQ ID NO: 976 or a sequence having at least 90%, 95%, 97%, 98%, or 99% identity thereto. In some embodiments, the aggregation domain comprises an amino acid sequence selected from SEQ ID NO: 979 or a sequence having at least 90%, 95%, 97%, 98%, or 99% identity thereto, or SEQ ID NO: 980 or a sequence having at least 90%, 95%, 97%, 98%, or 99% identity thereto. When the aggregation domain is derived from an FKBP, the deaggregation compound can be selected from AP21998 or AP22542, known in the art and described in Rollins et al 2000 PNAS vol. 97 no. 13, 7096-7101, WO/2000/023600, and Rivera, V. M., et al. (2000) Regulation of protein secretion through controlled aggregation in the endoplasmic reticulum. Science 287: 826-30. Each of these references is incorporated by reference in its entirety. While not wishing to be bound by theory, FKBP domains comprising F36M substitutions associate into dimers. The FKBP F36M dimers can be disassociated, e.g., deaggregated, by addition of ligand, e.g., FK506, rapamycin, AP22542, AP21998, or Shield-1.

[0596] GVQVETISPGDGRTFPKRGQTCVVHYTGMLEDGKKFDSSRDRNKPFKFMLGKQEVIRGWEEGVAQMSV GQRAKLTISPDYAYGATGHPGIIPPHATLVFDVELLKLE (SEQ ID NO: 975)

[0597] GVQVETISPGDGRTFPKRGQTCVVHYTGMLEDGKKMDSSRDRNKPFKFMLGKQEVIRGWEEGVAQMS VGQRAKLTISPDYAYGATGHPGIIPPHATLVFDVELLKLE (SEQ ID NO: 976)

[0598] RGVQVETISPGDGRTFPKRGQTCVVHYTGMLEDGKKFDSSRDRNKPFKFMLGKQEVIRGWEEGVAQM SVGQRAKLTISPDYAYGATGHPGIIPPHATLVFDVELLKLETRGVQVETISPGDGRTFPKRGQTCVVHYTG MLEDGKKMDSSRDRNKPFKFMLGKQEVIRGWEEGVAQMSVGQRAKLTISPDYAYGATGHPGIIPPHATL VFDVELLKLETRGVQVETISPGDGRTFPKRGQTCVVHYTGMLEDGKKMDSSRDRNKPFKFMLGKQEVIR GWEEGVAQMSVGQRAKLTISPDYAYGATGHPGIIPPHATLVFDVELLKLETRGVQVETISPGDGRTFPKR GQTCVVHYTGMLEDGKKMDSSRDRNKPFKFMLGKQEVIRGWEEGVAQMSVGQRAKLTISPDYAYGAT GHPGIIPPHATLVFDVELLKLET (SEQ ID NO: 979)

[0599] RGVQVETISPGDGRTFPKRGQTCVVHYTGMLEDGKKMDSSRDRNKPFKFMLGKQEVIRGWEEGVAQM SVGQRAKLTISPDYAYGATGHPGIIPPHATLVFDVELLKLETRGVQVETISPGDGRTFPKRGQTCVVHYTG MLEDGKKMDSSRDRNKPFKFMLGKQEVIRGWEEGVAQMSVGQRAKLTISPDYAYGATGHPGIIPPHATL VFDVELLKLETRGVQVETISPGDGRTFPKRGQTCVVHYTGMLEDGKKMDSSRDRNKPFKFMLGKQEVIR GWEEGVAQMSVGQRAKLTISPDYAYGATGHPGIIPPHATLVFDVELLKLETRGVQVETISPGDGRTFPKR GQTCVVHYTGMLEDGKKMDSSRDRNKPFKFMLGKQEVIRGWEEGVAQMSVGQRAKLTISPDYAYGAT GHPGIIPPHATLVFDVELLKLET (SEQ ID NO: 980)

[0600] In another embodiment, the aggregation domain is derived from a UVR8 protein. UVR8 is a plant photoreceptor protein (Chen et al. 2013. J. Cell. Biol. v201 no. 4: 631-640; Rizzini, L., et al. 2011. Science. 332:103-106; Christie, J. M., et al. 2012. Science. 335:1492-1496; Wu, D., et al. 2012. Nature. 484:214-219). Each of these references is incorporated by reference in its entirety. UVR8 constitutively forms photolabile homodimers which dissociate upon absorption of ultraviolet B (UVB) radiation (280-320 nm). In an embodiment, the aggregation domain is derived from a UVR8 domain, and the deaggregation compound is a suitable dose of UVB radiation. In an embodiment, the suitable dose of UVB radiation is sufficient to dissociate at least 25, 50, 75, or 100% of the UVR8 homodimers. In an embodiment, the suitable dose of UVB is minimally toxic to a cell comprising the fusion protein.

[0601] In some embodiments, a fusion protein of the present invention comprises multiple, e.g., 2, 3, 4, 5, 6, 7, 8, 9, 10, or more, copies of a conditional expression domain, e.g., an aggregation domain or degradation domain. In some embodiments, a fusion protein of the present invention comprises multiple, e.g., 2, 3, 4, 5, 6, 7, 8, 9, 10, or more, aggregation domains.

[0602] In some embodiments, each of the multiple aggregation domains is a copy of the same aggregation domain. Such aggregation domains would bind to each other to form homooligomers, e.g., homodimers,

[0603] In some embodiments, a fusion protein of the present invention comprises a plurality, e.g., more than one, of aggregation domains, wherein the plurality comprises more than one type, e.g., a first type and a second type, of aggregation domain. In some embodiments, the first type of aggregation domain associates, e.g., binds to and promotes oligomerization or aggregation, with the second type of aggregation domain; such association represents heteromeric association or heterooligomerization of aggregation domains, e.g., into heterodimers. In some embodiments, a fusion protein of the present invention comprises two, four, six, or eight aggregation domains, wherein the fusion protein comprises at least one of each type, e.g., a first type and a second type, of aggregation domain. In one embodiment, a fusion protein comprising a plurality of aggregation domains, wherein the plurality comprises more than one type, e.g., a first type and a second type, of aggregation domain, comprises equal numbers of each type of aggregation domain. In some embodiments, wherein a fusion protein comprises four or more (e.g., six, eight, ten, or more) aggregation domains, the aggregation domains are disposed in an alternating pattern in the fusion protein, e.g., type 1, type 2, type 1, type 2. In some embodiments, wherein a fusion protein comprises four or more (e.g., six, eight, ten, or more) aggregation domains, the aggregation domains are disposed in a block pattern in the fusion protein, e.g., type 1, type 1, type 2, type 2. In some embodiments, the first type of aggregation domain does not appreciably associate with other copies of the first type of aggregation domain and the second type of aggregation domain does not appreciably associate with other copies of the second type of aggregation domain. In some embodiments, the first type of aggregation domain only appreciably associates with other copies of the first type of aggregation domain and the second type of aggregation domain only appreciably associates with other copies of the second type of aggregation domain.

[0604] In some embodiments, the expression compound, e.g., deaggregation compound, is AP21998 or AP22542 (chemical structure shown here; AP21998 and AP22542 are the same in the portion left of the dashed line and differ in the portion right of the dashed line). Preparation and use of AP21998 and AP22542 can be found in the art and in Rollins et al. 2000, Amara, J. F., et al. (1997) Proc. Natl. Acad. Sci. USA 94, 10618-10623, Clackson, T., et al. (1998) Proc. Natl. Acad. Sci. USA 95, 10437-10442, and Yang, W., et al. (2000) J. Med. Chem. 43, 1135-1142. Each of these references is incorporated by reference in its entirety.

[chemical structure]

[0605] In some embodiments, the expression compound, e.g., deaggregation compound, is FK506 (tacrolimus) or rapamycin (sirolimus). In some embodiments, the conditional expression domain, e.g., aggregation domain, is derived from FKBP and the expression compound, e.g., deaggregation compound, is FK506 (tacrolimus) or rapamycin (sirolimus). Preparation and use of FK506 and rapamycin can be found in the art.

[0606] In some embodiments, the expression compound, e.g., deaggregation compound, inhibits interaction between aggregation domains. In some embodiments, wherein the deaggregation compound is FK506, rapamycin, AP22542, or AP21998, the deaggregation compound inhibits interaction between fusion proteins comprising an aggregation domain derived from FKBP F36M.

[0607] An exemplary aggregation domain-deaggregation compound pair has been generated and is featured in the present invention (SEQ ID NOs: 977 (nucleic acid) and 978 (amino acid)). This aggregation domain comprises an FKBP F36M domain as described in: “A ligand-reversible dimerization system for controlling protein-protein interactions.” Rollins et al. PNAS vol. 97 no. 13, 7096-7101, and WO/2000/023600. Each of these references is incorporated by reference in its entirety.

CD19bbz on-CAR nucleotide sequence, CD19 on-CAR
Signal peptide-conditional aggregation domains (4 repeats)-Furin site-FMC63bbz
(SEQ ID NO: 977)
ATGGCCTTACCAGTGACCGCCTTGCTCCTGCCGCTGGCCTTGCTGCTCCACGCCGCCAGGCCGGGATCCCGGGGCG
TGCAGGTTGAGACAATTTCCCCAGGAGATGGGCGAACGTTCCCCAAGCGCGGACAGACATGCGTTGTGCACTACA
CAGGAATGTTGGAGGACGGAAAGAAAATGGACAGTTCAAGAGATCGGAACAAACCATTCAAATTCATGTTGGGA
AAACAGGAAGTGATACGGGGCTGGGAAGAGGGTGTAGCGCAAATGTCCGTTGGTCAACGAGCAAAACTCACGAT
AAGTCCCGATTATGCTTACGGCGCAACCGGTCACCCGGGCATCATACCGCCTCATGCGACTTTGGTCTTTGATGTG
GAGCTGTTGAAACTTGAAACTCGCGGAGTACAGGTTGAAACAATATCACCCGGGGACGGGCGGACTTTTCCGAAG
AGAGGTCAGACCTGCGTCGTCCATTATACCGGTATGCTGGAGGACGGAAAGAAAATGGACAGCTCACGGGACCG
AAATAAACCATTCAAATTTATGTTGGGGAAACAAGAGGTTATCAGGGGCTGGGAGGAGGGTGTGGCCCAGATGT
CTGTCGGTCAGCGCGCGAAACTCACAATCTCTCCGGATTATGCGTATGGGGCGACAGGGCATCCGGGAATTATCC
CTCCCCACGCTACCTTGGTTTTCGATGTTGAGCTTCTGAAGTTGGAGACCAGAGGAGTTCAAGTGGAGACAATATC
TCCTGGGGATGGACGGACGTTCCCCAAGCGCGGCCAGACCTGTGTAGTCCACTACACAGGGATGCTTGAAGACG
GAAAAAAGATGGATAGCAGTAGAGATCGCAACAAACCATTTAAGTTCATGCTGGGGAAGCAGGAAGTAATACGC
GGCTGGGAGGAAGGCGTGGCACAGATGAGTGTTGGTCAACGGGCCAAACTTACTATTTCTCCCGATTATGCGTAT
GGAGCCACCGGGCACCCTGGCATTATCCCACCCCATGCCACATTGGTTTTTGACGTTGAATTGCTTAAATTGGAGA
CCAGGGGAGTCCAAGTGGAAACAATATCACCGGGGGATGGTCGGACTTTTCCTAAAAGGGGCCAAACCTGTGTA
GTCCATTATACCGGAATGCTCGAAGACGGAAAGAAAATGGACTCTTCTAGAGACCGCAATAAGCCCTTCAAGTTCA
TGTTGGGTAAGCAAGAGGTGATCCGGGGCTGGGAAGAGGGGGTCGCTCAAATGTCCGTCGGTCAGCGAGCTAAA
CTGACTATTTCCCCAGACTACGCATATGGAGCGACTGGCCACCCCGGTATTATTCCTCCCCATGCGACTCTCGTGTT
CGACGTAGAACTCTTGAAATTGGAAACGTCAGCCCGGAACAGGCGGAAGAGAGGATCCGACATCCAGATGACAC
AGACTACATCCTCCCTGTCTGCCTCTCTGGGAGACAGAGTCACCATCAGTTGCAGGGCAAGTCAGGACATTAGTAA
ATATTTAAATTGGTATCAGCAGAAACCAGATGGAACTGTTAAACTCCTGATCTACCATACATCAAGATTACACTCAG
GAGTCCCATCAAGGTTCAGTGGCAGTGGGTCTGGAACAGATTATTCTCTCACCATTAGCAACCTGGAGCAAGAAG
ATATTGCCACTTACTTTTGCCAACAGGGTAATACGCTTCCGTACACGTTCGGAGGGGGGACTAAGTTGGAAATAAC
AGGTGGCGGTGGCTCGGGCGGTGGTGGGTCGGGTGGCGGCGGATCTGAGGTGAAACTGCAGGAGTCAGGACCT
GGCCTGGTGGCGCCCTCACAGAGCCTGTCCGTCACATGCACTGTCTCAGGGGTCTCATTACCCGACTATGGTGTAA
GCTGGATTCGCCAGCCTCCACGAAAGGGTCTGGAGTGGCTGGGAGTAATATGGGGTAGTGAAACCACATACTATA
ATTCAGCTCTCAAATCCAGACTGACCATCATCAAGGACAACTCCAAGAGCCAAGTTTTCTTAAAAATGAACAGTCT
GCAAACTGATGACACAGCCATTTACTACTGTGCCAAACATTATTACTACGGTGGTAGCTATGCTATGGACTACTGG
GGTCAAGGAACCTCAGTCACCGTCTCCTCAGCTAGCACCACGACGCCAGCGCCGCGACCACCAACACCGGCGCCC
ACCATCGCGTCGCAGCCCCTGTCCCTGCGCCCAGAGGCGTGCCGGCCAGCGGCGGGGGGCGCAGTGCACACGAG
GGGGCTGGACTTCGCCTGTGATTCCGGAATCTACATCTGGGCGCCCTTGGCCGGGACTTGTGGGGTCCTTCTCCTG
TCACTGGTTATCACCCTTTACTGCAAACGGGGCAGAAAGAAACTCCTGTATATATTCAAACAACCATTTATGAGACC
AGTACAAACTACTCAAGAGGAAGATGGCTGTAGCTGCCGATTTCCAGAAGAAGAAGAAGGAGGATGTGAACTGA
GAGTGAAGTTCAGCAGGAGCGCAGACGCCCCCGCGTACCAGCAGGGCCAGAACCAGCTCTATAACGAGCTCAAT
CTAGGACGAAGAGAGGAGTACGATGTTTTGGACAAGAGACGTGGCCGGGACCCTGAGATGGGGGGAAAGCCGA
GAAGGAAGAACCCTCAGGAAGGCCTGTACAATGAACTGCAGAAAGATAAGATGGCGGAGGCCTACAGTGAGATT
GGGATGAAAGGCGAGCGCCGGAGGGGCAAGGGGCACGATGGCCTTTACCAGGGTCTCAGTACAGCCACCAAGG
ACACCTACGACGCCCTTCACATGCAGGCCCTGCCCCCTCGCTAA
CD19bbz on-CAR amino acid sequence
Signal peptide-conditional aggregation domains (4 repeats)-Furin site-FMC63bbz
(SEQ ID NO: 978)
MALPVTALLLPLALLLHAARPGSRGVQVETISPGDGRTFPKRGQTCVVHYTGMLEDGKKMDSSRDRNKPFKFMLGKQ
EVIRGWEEGVAQMSVGQRAKLTISPDYAYGATGHPGIIPPHATLVFDVELLKLETRGVQVETISPGDGRTFPKRGQTCV
VHYTGMLEDGKKMDSSRDRNKPFKFMLGKQEVIRGWEEGVAQMSVGQRAKLTISPDYAYGATGHPGIIPPHATLVFD
VELLKLETRGVQVETISPGDGRTFPKRGQTCVVHYTGMLEDGKKMDSSRDRNKPFKFMLGKQEVIRGWEEGVAQMS
VGQRAKLTISPDYAYGATGHPGIIPPHATLVFDVELLKLETRGVQVETISPGDGRTFPKRGQTCVVHYTGMLEDGKKMD
SSRDRNKPFKFMLGKQEVIRGWEEGVAQMSVGQRAKLTISPDYAYGATGHPGIIPPHATLVFDVELLKLETSARNRRKR
GSDIQMTQTTSSLSASLGDRVTISCRASQDISKYLNWYQQKPDGTVKLLIYHTSRLHSGVPSRFSGSGSGTDYSLTISNLE
QEDIATYFCQQGNTLPYTFGGGTKLEITGGGGSGGGGSGGGGSEVKLQESGPGLVAPSQSLSVTCTVSGVSLPDYGVS
WIRQPPRKGLEWLGVIWGSETTYYNSALKSRLTIIKDNSKSQVFLKMNSLQTDDTAIYYCAKHYYYGGSYAMDYWGQG
TSVTVSSASTTTPAPRPPTPAPTIASQPLSLRPEACRPAAGGAVHTRGLDFACDSGIYIWAPLAGTCGVLLLSLVITLYCKR
GRKKLLYIFKQPFMRPVQTTQEEDGCSCRFPEEEEGGCELRVKFSRSADAPAYQQGQNQLYNELNLGRREEYDVLDKR
RGRDPEMGGKPRRKNPQEGLYNELQKDKMAEAYSEIGMKGERRRGKGHDGLYQGLSTATKDTYDALHMQALPPRZ

[0608] Degradation Domains

[0609] In some embodiments, the conditional expression domain is a degradation domain. Methods of generating degradation domains that are selectively stable in the presence of a stabilization compound are well known in the art and discussed further below. Several such domain-stabilization compound pairs have been generated to date and are featured in the present invention. These include degradation domains based on FKBP (e.g., using a “Shield” stabilization compound) as described in: A Rapid, Reversible, and Tunable Method to Regulate Protein Function in Living Cells Using Synthetic Small Molecules.” Banaszynski, L. A.; Chen, L.-C.; Maynard-Smith, L. A.; Ooi, A. G. L.; Wandless, T. J. Cell, 2006, 126, 995-1004; domains based on DHFR (e.g., using trimethoprim as a stabilization compound) as described in A general chemical method to regulate protein stability in the mammalian central nervous system. Iwamoto, M.; Björklund, T.; Lundberg, C.; Kirik, D.; Wandless, T. J. Chemistry & Biology, 2010, 17, 981-988; and domains based on estrogen receptor alpha (e.g., where 4OHT is used as a stabilization compound) as described in Destabilizing domains derived from the human estrogen receptor Y Miyazaki, H Imoto, L-c Chen, T J Wandless J. Am. Chem. Soc. 2012, 134, 3942-3945. Each of these references is incorporated by reference in its entirety.

[0610] The present disclosure encompasses degradation domains derived from any naturally occurring protein. Preferably, fusion proteins of the invention will include a degradation domain for which there is no ligand natively expressed in the cell compartments of interest. For example, if the fusion protein is designed for expression in T-cells, it is preferable to select a degradation domain for which there is no naturally occurring ligand present in T cells. Thus, the degradation domain, when expressed in the cell of interest, will only be stabilized in the presence of an exogenously added compound. Notably, this property can be engineered by either engineering the degradation domain to no longer bind a natively expressed ligand (in which case the degradation domain will only be stable in the presence of a synthetic compound) or by expressing the degradation domain in a compartment where the natively expressed ligand does not occur (e.g., the degradation domain can be derived from a species other than the species in which the fusion protein will be expressed).

[0611] Degradation domain-stabilization compound pairs can be derived from any naturally occurring or synthetically developed protein. Stabilization compounds can be any naturally occurring or synthetic compounds. In certain embodiments, the stabilization compounds will be existing prescription or over-the-counter medicines. Examples of proteins that can be engineered to possess the properties of a degradation domain are set forth in Table 21 below along with a corresponding stabilization compound.

[0612] In some embodiments, the degradation domain is derived from a protein listed in Table 21.

[0613] In some embodiments, the degradation domain is derived from an estrogen receptor (ER). In some embodiments, the degradation domain comprises an amino acid sequence selected from SEQ ID NO: 58 or a sequence having at least 90%, 95%, 97%, 98%, or 99% identity thereto, or SEQ ID NO: 121 or a sequence having at least 90%, 95%, 97%, 98%, or 99% identity thereto. In some embodiments, the degradation domain comprises an amino acid sequence selected from SEQ ID NO: 58, or SEQ ID NO: 121. When the degradation domain is derived from an estrogen receptor, the stabilization compound can be selected from Bazedoxifene or 4-hydroxy tamoxifen (4-OHT). In some embodiments, the stabilization compound is Bazedoxifene. Tamoxifen and Bazedoxifene are FDA approved drugs, and thus are safe to use in human.

[0614] In some embodiments, the degradation domain is derived from an FKB protein (FKBP). In some embodiments, the degradation domain comprises an amino acid sequence of SEQ ID NO: 56 or a sequence having at least 90%, 95%, 97%, 98%, or 99% identity thereto. In some embodiments, the degradation domain comprises an amino acid sequence of SEQ ID NO: 56. When the degradation domain is derived from a FKBP, the stabilization compound can be Shield-1.

[0615] In some embodiments, the degradation domain is derived from dihydrofolate reductase (DHFR). In some embodiments, the degradation domain comprises an amino acid sequence selected from SEQ ID NO: 57 or a sequence having at least 90%, 95%, 97%, 98%, or 99% identity thereto. In some embodiments, the degradation domain comprises an amino acid sequence selected from SEQ ID NO: 57. When the degradation domain is derived from a DHFR, the stabilization compound can be Trimethoprim.

[0616] In some embodiments, the degradation domain is not derived from an FKB protein, estrogen receptor, or DHFR.

TABLE 21
Exemplary proteins for generating degradation domains

| | | |
|---|---|---|
| Type | Activity of drug | Drug examples |

Oxidoreductases

| | | |
|---|---|---|
| Aldehyde dehydrogenase | Inhibitor | Disulfiram |
| Monoamine oxidases (MAOs) | MAO-A inhibitor | Tranylcypromine, moclobemide |
| | MAO-B inhibitor | Tranylcypromine |
| Cyclooxygenases (COXs) | COX1 inhibitor | Acetylsalicylic acid, profens, |
| | | acetaminophen and dipyrone (as |
| | | arachidonylamides) |
| | COX2 inhibitor | Acetylsalicylic acid, profens, |
| | | acetaminophen and dipyrone (as |
| | | arachidonylamides) |
| Vitamin K epoxide reductase | Inhibitor | Warfarin, phenprocoumon |
| Aromatase | Inhibitor | Exemestane |
| Lanosterol demethylase | Inhibitor | Azole antifungals |
| (fungal) | | |
| Lipoxygenases | Inhibitor | Mesalazine |
| | 5-lipoxygenase inhibitor | Zileuton |
| Thyroidal peroxidase | Inhibitor | Thiouracils |
| Iodothyronine-5′ deiodinase | Inhibitor | Propylthiouracil |
| Inosine monophosphate | Inhibitor | Mycophenolate mofetil |
| dehydrogenase | | |
| HMG-CoA reductase | Inhibitor | Statins |
| α-5-Testosterone reductase | Inhibitor | Finasteride, dutasteride |
| Dihydrofolate reductase | Inhibitor | Trimethoprim |
| (bacterial) | | |
| Dihydrofolate reductase | Inhibitor | Methotrexate, pemetrexed |
| (human) | | |
| Dihydrofolate reductase | Inhibitor | Proguanil |
| (parasitic) | | |
| Dihydroorotate reductase | Inhibitor | Leflunomide |
| Enoyl reductase | Inhibitor | Isoniazid |
| (mycobacterial) | | |
| Squalene epoxidase (fungal) | Inhibitor | Terbinafin |
| Δ-14 reductase (fungal) | Inhibitor | Amorolfin |
| Xanthine oxidase | Inhibitor | Allopurinol |
| 4-Hydroxyphenylpyruvate | Inhibitor | Nitisinone |
| dioxygenase | | |
| Ribonucleoside diphosphate | Inhibitor | Hydroxycarbamide |
| reductase | | |

Transferases

| | | |
|---|---|---|
| Protein kinase C | Inhibitor | Miltefosine |
| Bacterial peptidyl transferase | Inhibitor | Chloramphenicol |
| Catecholamine-O- | Inhibitor | Entacapone |
| methyltransferase | | |
| RNA polymerase (bacterial) | Inhibitor | Ansamycins |
| Reverse transcriptases (viral) | Competitive inhibitors | Zidovudine |
| | Allosteric inhibitors | Efavirenz |
| DNA polymerases | Inhibitor | Acyclovir, suramin |
| GABA transaminase | Inhibitor | Valproic acid, vigabatrin |
| Tyrosine kinases | PDGFR/ABL/KIT inhibitor | Imatinib |
| | EGFR inhibitor | Erlotinib |
| | β-VEGFR2/PDGFR/KIT/FLT3 | Sunitinib |
| | β-VEGFR2/PDGFR/RAF | Sorafenib |
| Glycinamide ribonucleotide | Inhibitor | Pemetrexed |
| formyl transferase | | |
| Phosphoenolpyruvate | Inhibitor | Fosfomycin |
| transferase (MurA, bacterial) | | |
| Human cytosolic branched- | Inhibitor | Gabapentin |
| chain aminotransferase | | |
| (hBCATc) | | |

Hydrolases (proteases)

| | | |
|---|---|---|
| Aspartyl proteases (viral) | HIV protease inhibitor | Saquinavir, indinavir |

Hydrolases (serine proteases)

| | | |
|---|---|---|
| Unspecific | Unspecific inhibitors | Aprotinine |
| Bacterial serine protease | Direct inhibitor | β-lactams |
| Bacterial serine protease | Indirect inhibitor | Glycopeptides |
| Bacterial lactamases | Direct inhibitor | Sulbactam |
| Human antithrombin | Activator | Heparins |
| Human plasminogen | Activator | Streptokinase |
| Human coagulation factor | Activator | Factor IX complex, Factor VIII |
| Human factor Xa | Inhibitor | Fondaparinux |

Hydrolases (metalloproteases)

| | | |
|---|---|---|
| Human ACE | Inhibitor | Captopril |
| Human HRD | Inhibitor | Cilastatin |
| Human carboxypeptidase A | Inhibitor | Penicillamine |
| (Zn) | | |
| Human enkephalinase | Inhibitor | Racecadotril |

Hydrolases (other)

| | | |
|---|---|---|
| 26S proteasome | Inhibitor | Bortezomib |
| Esterases | AChE inhibitor | Physostigmine |
| | AChE reactivators | Obidoxime |
| | PDE inhibitor | Caffeine |
| | PDE3 inhibitor | Amrinon, milrinone |
| | PDE4 inhibitor | Papaverine |
| | PDE5 inhibitor | Sildenafil |
| | HDAC inhibitor | Valproic acid |
| | HDAC3/HDAC7 inhibitor | Carbamezepine |
| Glycosidases (viral) | α-glycosidase inhibitor | Zanamivir, oseltamivir |
| Glycosidases (human) | α-glycosidase inhibitor | Acarbose |
| Lipases | Gastrointestinal lipases inhibitor | Orlistat |
| Phosphatases | Calcineurin inhibitor | Cyclosporin |
| | Inositol polyphosphate | Lithium ions |
| | phosphatase inhibitor | |
| GTPases | Rac1 inhibitor | 6-Thio-GTP (azathioprine |
| | | metabolite) |
| Phosphorylases | Bacterial C55-lipid phosphate | Bacitracin |
| | dephosphorylase inhibitor | |

Lyases

| | | |
|---|---|---|
| DOPA decarboxylase | Inhibitor | Carbidopa |
| Carbonic anhydrase | Inhibitor | Acetazolamide |
| Histidine decarboxylase | Inhibitor | Tritoqualine |
| Ornithine decarboxylase | Inhibitor | Eflornithine |
| Soluble guanylyl cyclase | Activator | Nitric acid esters, molsidomine |

Isomerases

| | | |
|---|---|---|
| Alanine racemase | Inhibitor | D-Cycloserine |
| DNA gyrases (bacterial) | Inhibitor | Fluoroquinolones |
| Topoisomerases | Topoisomerase I inhibitor | Irinotecan |
| | Topoisomerase II inhibitor | Etoposide |
| 8,7 isomerase (fungal) | Inhibitor | Amorolfin |

Ligases (also known as synthases)

| | | |
|---|---|---|
| Dihydropteroate synthase | Inhibitor | Sulphonamides |
| Thymidylate synthase (fungal | Inhibitor | Fluorouracil |
| and human) | | |
| Thymidylate synthase (human) | Inhibitor | Methotrexate, pemetrexed |
| Phosphofructokinase | Inhibitor | Antimony compounds |
| mTOR | Inhibitor | Rapamycin |
| Haem polymerase | Inhibitor | Quinoline antimalarials |
| (Plasmodium) | | |
| β-1,3--D-glucansynthase | Inhibitor | Caspofungin |
| (fungi) | | |
| Glucosylceramide synthase | Inhibitor | Miglustat |

| Substrate | Drug substance |
|---|---|
| Asparagine | Asparaginase |
| Urate | Rasburicase (a urate oxidase) |
| VAMP-synaptobrevin, | Light chain of the botulinum |
| SNAP25, Syntaxin | neurotoxin (Zn-endopeptidase) |

| | | |
|---|---|---|
| Type | Activity of drug | Drug examples |

Direct ligand-gated ion channel receptors

| | | |
|---|---|---|
| GABA_{A} receptors | Barbiturate binding site agonists | Barbiturate |
| | Benzodiazepine binding site | Benzodiazepines |
| | agonists | |
| | Benzodiazepine binding site | Flumazenil |
| | antagonists | |
| Acetylcholine receptors | Nicotinic receptor agonists | Pyrantel (of Angiostrongylus), |
| | | levamisole |
| | Nicotinic receptor stabilizing | Alcuronium |
| | antagonists | |
| | Nicotinic receptor depolarizing | Suxamethonium |
| | antagonists | |
| | Nicotinic receptor allosteric | Galantamine |
| | modulators | |
| Glutamate receptors | NMDA subtype antagonists | Memantine |
| (ionotropic) | | |
| | NMDA subtype expression | Acamprosate |
| | modulators | |
| | NMDA subtype phencyclidine | Ketamine |
| | binding site antagonists | |

G-protein-coupled receptors

| | | |
|---|---|---|
| Acetylcholine receptors | Muscarinic receptor agonists | Pilocarpine |
| | Muscarinic receptor antagonists | Tropane derivatives |
| | Muscarinic receptor | Darifenacine |
| | M₃ antagonists | |
| Adenosine receptors | Agonists | Adenosine |
| | Adenosine A₁ receptor agonists | Lignans from valerian |
| | Adenosine A1 receptor | Caffeine, theophylline |
| | antagonists | |
| | Adenosine A_{2A} receptor | Caffeine, theophylline |
| | antagonists | |
| Adrenoceptors | Agonists | Adrenaline, noradrenaline, |
| | | ephedrine |
| | α₁- and α₂-receptors agonists | Xylometazoline |
| | α₁-receptor antagonists | Ergotamine |
| | α₂-receptor, central agonists | Methyldopa (as |
| | | methylnoradrenaline) |
| | β-adrenoceptor antagonists | Isoprenaline |
| | β₁-receptor antagonists | Propranolol, atenolol |
| | β₂-receptor agonists | Salbutamol |
| | β₂-receptor antagonists | Propranolol |
| Angiotensin receptors | AT₁-receptors antagonists | Sartans |
| Calcium-sensing receptor | Agonists | Strontium ions |
| | Allosteric activators | Cinacalcet |
| Cannabinoid receptors | CB₁ - and CB₂-receptors | Dronabinol |
| | agonists | |
| Cysteinyl-leukotriene receptors | Antagonists | Montelukast |
| Dopamine receptors | Dopamine receptor subtype | Dopamine, levodopa |
| | direct agonists | |
| | D₂, D₃ and D₄ agonists | Apomorphine |
| | D₂, D₃ and D₄ antagonists | Chlorpromazine, fluphenazine, |
| | | haloperidol, metoclopramide, |
| | | ziprasidone |
| Endothelin receptors (ET_{A}, ET_{B}) | Antagonists | Bosentan |
| GABA_{B} receptors | Agonists | Baclofen |
| Glucagon receptors | Agonists | Glucagon |
| Glucagon-like peptide-1 | Agonists | Exenatide |
| receptor | | |
| Histamine receptors | H₁-antagonists | Diphenhydramine |
| | H₂-antagonists | Cimetidine |
| Opioid receptors | μ-opioid agonists | Morphine, buprenorphine |
| | μ-, κ- and δ-opioid antagonists | Naltrexone |
| | κ-opioid antagonists | Buprenorphine |
| Neurokinin receptors | NK₁ receptor antagonists | Aprepitant |
| Prostanoid receptors | Agonists | Misoprostol, sulprostone, iloprost |
| Prostamide receptors | Agonists | Bimatoprost |
| Purinergic receptors | P₂Y₁₂ antagonists | Clopidogrel |
| Serotonin receptors | Subtype-specific (partial) | Ergometrine, ergotamine |
| | agonists | |
| | 5-HT_{1A} partial agonists | Buspirone |
| | 5-HT_{1B/1D} agonists | Triptans |
| | 5-HT_{2A} antagonists | Quetiapine, ziprasidone |
| | 5-HT₃ antagonists | Granisetron |
| | 5-HT₄ partial agonists | Tegaserode |
| Vasopressin receptors | Agonists | Vasopressin |
| | V₁ agonists | Terlipressin |
| | V₂ agonists | Desmopressin |
| | OT agonists | Oxytocin |
| | OT antagonists | Atosiban |

Cytokine receptors

| | | |
|---|---|---|
| Class I cytokine receptors | Growth hormone receptor | Pegvisomant |
| | antagonists | |
| | Erythropoietin receptor | Erythropoietin |
| | agonists | |
| | Granulocyte colony stimulating | Filgrastim |
| | factor agonists | |
| | Granulocyte-macrophage | Molgramostim |
| | colony stimulating factor | |
| | agonists | |
| | Interleukin-1 receptor | Anakinra |
| | antagonists | |
| | Interleukin-2 receptor agonists | Aldesleukin |
| TNFα receptors | Mimetics (soluble) | Etanercept |

Integrin receptors

| | | |
|---|---|---|
| Glycoprotein IIb/IIIa receptor | Antagonists | Tirofiban |

Receptors associated with a tyrosine kinase

| | | |
|---|---|---|
| Insulin receptor | Direct agonists | Insulin |
| Insulin receptor | Sensitizers | Biguanides |

Nuclear receptors (steroid hormone receptors)

| | | |
|---|---|---|
| Mineralocorticoid receptor | Agonists | Aldosterone |
| | Antagonists | Spironolactone |
| Glucocorticoid receptor | Agonists | Glucocorticoids |
| Progesterone receptor | Agonists | Gestagens |
| Estrogen receptor | Agonists | Oestrogens |
| | (Partial) antagonists | Clomifene |
| | Antagonists | Fulvestrant |
| | Modulators | Tamoxifen, raloxifene |
| | Androgen receptor Agonists | Testosterone |
| | Antagonists | Cyproterone acetate |
| Vitamin D receptor | Agonists | Retinoids |
| ACTH receptor agonists | Agonists | Tetracosactide (also known as |
| | | cosyntropin) |

Nuclear receptors (other)

| | | |
|---|---|---|
| | α-Retinoic acid receptors | Isotretinoin |
| | RAR agonists | |
| | β-RAR agonists | Adapalene, isotretinoin |
| | γ-RAR agonists | Adapalene, isotretinoin |
| Peroxisome proliferator- | α-PPAR agonists | Fibrates |
| activated receptor (PPAR) | | |
| | γ-PPAR agonists | Glitazones |
| Thyroid hormone receptors | Agonists | L-Thyroxine |

Voltage-gated Ca²⁺ channels

| | | |
|---|---|---|
| General | Inhibitor | Oxcarbazepine |
| In Schistosoma sp. | Inhibitor | Praziquantel |
| L-type channels | Inhibitor | Dihydropyridines, diltiazem, |
| | | lercanidipine, pregabalin, |
| | | verapamil |
| T-type channels | Inhibitor | Succinimides |

K+ channels

| | | |
|---|---|---|
| Epithelial K⁺ channels | Opener Inhibitor | Diazoxide, minoxidil |
| | | Nateglinide, sulphonylureas |
| Voltage-gated K⁺ channels | Inhibitor | Amiodarone |

Na⁺ channels

| | | |
|---|---|---|
| Epithelial Na+ channels (ENaC) | Inhibitor | Amiloride, bupivacaine, |
| | | lidocaine, procainamide, |
| | | quinidine |
| Voltage-gated Na⁺ channels | Inhibitor | Carbamazepine, flecainide, |
| | | lamotrigine, phenytoin, |
| | | propafenone, topiramate, |
| | | valproic acid |

Ryanodine-inositol 1,4,5-triphosphate receptor Ca²⁺ channel (RIR-CaC) family

| | | |
|---|---|---|
| Ryanodine receptors | Inhibitor | Dantrolene |

Transient receptor potential Ca²⁺ channel (TRP-CC) family

| | | |
|---|---|---|
| TRPV1 receptors | Inhibitor | Acetaminophen (as |
| | | arachidonylamide) |

Cl− channels

| | | |
|---|---|---|
| Cl⁻channel | Inhibitor (mast cells) Opener | Cromolyn sodium Ivermectin |
| | (parasites) | |
| Cation-chloride cotransporter | Thiazide-sensitive NaCl | Thiazide diuretics |
| (CCC) family | symporter, human inhibitor | |
| | Bumetanide-sensitive | Furosemide |
| | NaCl/KCl symporters, human | |
| | inhibitor | |
| Na⁺/H⁺ antiporters | Inhibitor | Amiloride, triamterene |
| Proton pumps | Ca²⁺-dependent ATPase | Artemisinin and derivatives |
| | (PfATP6; Plasmodia) inhibitor | |
| H⁺/K⁺-ATPase | Inhibitor | Omeprazole |
| Na⁺/K⁺ ATPase | Inhibitor | Cardiac glycosides |
| Eukaryotic (putative) sterol | Niemann-Pick C1 like 1 | Ezetimibe |
| transporter (EST) family | (NPC1L1) protein inhibitor | |
| Neurotransmitter/Na⁺ symporter | Serotonin/Na⁺ symporter | Cocaine, tricyclic |
| (NSS) family | inhibitor | antidepressants, paroxetine |
| | Noradrenaline/Na⁺ symporter | Bupropion, venlafaxine |
| | inhibitor | |
| | Dopamine/Na⁺ symporter | Tricyclic antidepressants, |
| | inhibitor | cocaine, amphetamines |
| | Vesicular monoamine | Reserpine |
| | transporter inhibitor | |

Nucleic acids

| | | |
|---|---|---|
| DNA and RNA | Alkylation | Chlorambucil, |
| | | cyclophosphamide, dacarbazine |
| | Complexation | Cisplatin |
| | Intercalation | Doxorubicin |
| | Oxidative degradation | Bleomycin |
| | Strand breaks | Nitroimidazoles |
| RNA | Interaction with 16S-rRNA | Aminoglycoside antiinfectives |
| | Interaction with 23S-rRNA | Macrolide antiinfectives |
| | 23S-rRNA/tRNA/2-polypeptide | Oxazolidinone antiinfectives |
| | complex | |
| Spindle | Inhibition of development | Vinca alkaloids |
| | Inhibition of desaggregation | Taxanes |
| Inhibition of mitosis | — | Colchicine |

Ribosome

| | | |
|---|---|---|
| 30S subunit (bacterial) | Inhibitors | Tetracyclines |
| 50S subunit (bacterial) | Inhibitors | Lincosamides, quinupristin- |
| | | dalfopristin |

[0617] Degradation domains can be engineered from known proteins (e.g., those proteins set forth in the above table) through any of a variety of routine methods known in the art. Generally, such methods employ first creating a library of interest including proteins derived from the, e.g., naturally occurring protein. Second, cells or cell populations expressing proteins from individual library constructs will be selected on the basis of whether the expression of the derived protein is dependent on the presence of the desired stabilization compound. The process of derivation and selection can be repeated in as many cycles necessary to identify a suitable candidate.

[0618] For example, a library can be created through rational protein design based on sampling different structures and putative affinities of the protein domain to the selected compound. Alternatively, a library can be generated by random mutagenesis of the target protein. In either case, e.g., Jurkat cells can be transduced with a lentiviral library generated from the constructs. Jurkat cells can then undergo a round of FACS sorting, to eliminate cells that constitutively express the protein of interest. In the next stage, the sorted cells are incubated with the compound of choice for 24 hrs and positive cells are FACS sorted. These are expanded through single cell cloning. From there, individual transduced clones will be assessed for the ability to induce expression of the protein of interest in a compound-dependent manner.

### Suicide Genes and Domains

[0619] The present invention, in part, utilizes CAR technology for methods of selectively ablating or activating modified T cells from a subject after adoptive transfer. In one embodiment, a modified CAR T cell is selectively ablated in the subject by inducing activation of a suicide domain in the modified T cell. In another embodiment, a modified T cell is selectively activated in the subject by actively preventing the apoptosis of modified CAR T cell during therapy. In yet another embodiment, the modified T cell is selectively activated in the subject by allowing cell-surface expression of the CAR construct.

[0620] Some of the potential side effects of non-target cell recognition by CAR T cells can be overcome by the co-expression of a suicide gene in the CAR T cell. In addition, the CAR T cells can be selectively ablated after targeting B cells for depletion to treat autoantibody or alloantibody diseases or conditions.

[0621] The invention includes an isolated nucleic acid comprising a suicide gene. Examples of suicide genes include, but are not limited to, herpes simplex virus thymidine kinase (HSV-TK), the cytoplasmic domain of Fas, a caspase such as caspase-8 or caspase-9, cytosine deaminase, E1A, FHIT, and other known suicide or apoptosis-inducing genes (Straathof et al., 2005, Blood 105:4247-4254; Cohen et al., 1999, Leuk. Lymphoma 34:473-480; Thomis et al., 2001, Blood 97:1249-1257; Tey et al., 2007, Biol. Blood Marrow Transplant 13:913-924; and Di Stasi et al., 2011, N. Engl. J. Med. 365:1673-1683).

[0622] The suicide gene may be operably linked to a promoter, such as an inducible promoter sequence. Examples of inducible promoters include, but are not limited to, a heat shock promoter, a tetracycline-regulated promoter, a steroid-regulated promoter, a metal-regulated promoter, an estrogen receptor-regulated promoter, and others known in the art. In one aspect, the invention includes an isolated nucleic acid sequence comprising a nucleic acid sequence comprising a suicide gene and a nucleic acid encoding a chimeric antigen receptor. In another aspect, the invention includes an isolated nucleic acid sequence comprising a nucleic acid sequence comprising a suicide gene and a nucleic acid encoding a chimeric antigen receptor. In one embodiment, the suicide gene comprises the nucleic acid selected from the group consisting of

ATGCTCGAGGGGGTTCAGGTGGAGACTATCAGCCCGGGCGACGGACGGACATTCCCAAAGCGCGG
GCAGACGTGTGTGGTGCATTACACCGGGATGCTTGAGGACGGAAAGAAAGTGGACTCTTCCCGAGA
CCGAAATAAACCATTCAAGTTCATGTTGGGCAAGCAGGAGGTTATCAGAGGGTGGGAGGAGGGCGT
CGCTCAGATGAGTGTCGGACAGAGGGCCAAGCTCACGATCTCCCCTGATTACGCCTACGGGGCAAC
TGGTCACCCCGGAATCATCCCCCCTCACGCAACCCTCGTGTTCGACGTCGAGCTGCTCAAACTGGA
ATCAGGCGGAGGCAGTGGCGCTAGCGGGTTTGGCGATGTCGGTGCCCTTGAAAGCTTGAGAGGAA
ATGCCGATCTCGCTTACATCTTGAGCATGGAGCCCTGTGGGCACTGTCTGATCATCAACAATGTTAA
CTTTTGCCGGGAGTCCGGCCTGCGCACACGCACAGGCTCCAACATTGACTGCGAAAAACTTCGAAG
GAGGTTTAGCTCTCTGCATTTCATGGTAGAGGTGAAGGGGGATCTGACCGCCAAGAAAATGGTTCTC
GCCCTTCTCGAGCTTGCGCAGCAGGACCATGGAGCGCTTGACTGTTGTGTCGTTGTGATACTGAGC
CATGGCTGTCAGGCTTCCCATCTCCAGTTTCCAGGGGCCGTGTACGGAACCGATGGATGCCCTGTG
TCAGTTGAAAAGATCGTAAACATCTTTAACGGAACATCTTGCCCGAGCCTCGGCGGTAAACCGAAGC
TTTTTTTTATCCAGGCCTGCGGCGGTGAACAGAAAGATCATGGCTTCGAGGTTGCCAGTACCAGCCC
TGAAGACGAATCCCCCGGGTCAAATCCTGAACCAGATGCGACCCCTTTCCAGGAAGGACTCCGCAC
TTTTGACCAGCTTGACGCCATTTCCTCCCTGCCAACACCTTCCGACATATTTGTAAGCTACTCCACCT
TTCCAGGATTCGTGAGCTGGCGCGACCCAAAATCCGGCAGTTGGTATGTTGAAACCCTGGACGATAT
TTTCGAACAATGGGCCCACAGTGAGGACCTGCAGTCCCTTCTTCTGCGCGTAGCCAATGCCGTGTC
AGTCAAAGGGATTTACAAGCAGATGCCAGGCTGCTTTAATTTCCTGCGCAAGAAACTGTTTTTTAAGA
CCAGT or SEQ ID NO: 3001;
CGGACGGACATTCCCAAAGCGCGGGCAGACGTGTGTGGTGCATTACACCGGGATGCTTGAGGACG
GAAAGAAAGTGGACTCTTCCCGAGACCGAAATAAACCATTCAAGTTCATGTTGGGCAAGCAGGAGGT
TATCAGAGGGTGGGAGGAGGGCGTCGCTCAGATGAGTGTCGGACAGAGGGCCAAGCTCACGATCT
CCCCTGATTACGCCTACGGGGCAACTGGTCACCCCGGAATCATCCCCCCTCACGCAACCCTCGTGT
TCGACGTCGAGCTGCTCAAACTGGAATCAGGCGGAGGCAGTGGCGGGTTTGGCGATGTCGGTGCC
CTTGAAAGCTTGAGAGGAAATGCCGATCTCGCTTACATCTTGAGCATGGAGCCCTGTGGGCACTGTC
TGATCATCAACAATGTTAACTTTTGCCGGGAGTCCGGCCTGCGCACACGCACAGGCTCCAACATTGA
CTGCGAAAAACTTCGAAGGAGGTTTAGCTCTCTGCATTTCATGGTAGAGGTGAAGGGGGATCTGACC
GCCAAGAAAATGGTTCTCGCCCTTCTCGAGCTTGCGCAGCAGGACCATGGAGCGCTTGACTGTTGT
GTCGTTGTGATACTGAGCCATGGCTGTCAGGCTTCCCATCTCCAGTTTCCAGGGGCCGTGTACGGA
ACCGATGGATGCCCTGTGTCAGTTGAAAAGATCGTAAACATCTTTAACGGAACATCTTGCCCGAGCC
TCGGCGGTAAACCGAAGCTTTTTTTTATCCAGGCCTGCGGCGGTGAACAGAAAGATCATGGCTTCGA
GGTTGCCAGTACCAGCCCTGAAGACGAATCCCCCGGGTCAAATCCTGAACCAGATGCGACCCCTTT
CCAGGAAGGACTCCGCACTTTTGACCAGCTTGACGCCATTTCCTCCCTGCCAACACCTTCCGACATA
TTTGTAAGCTACTCCACCTTTCCAGGATTCGTGAGCTGGCGCGACCCAAAATCCGGCAGTTGGTATG
TTGAAACCCTGGACGATATCTTCGAACAATGGGCCCACAGTGAGGACCTGCAGTCCCTTCTTCTGCG
CGTAGCCAATGCCGTGTCAGTCAAAGGGATTTACAAGCAGATGCCAGGCTGCTTTAATTTCCTGCGC
AAGAAACTGTTTTTTAAGACCAGTTGAGTCGACGGAGGAGGAG or SEQ ID NO: 3002;
GGGGTTCAGGTGGAGACTATCAGCCCGGGCGACGGACGGACATTCCCAAAGCGCGGGCAGACGTG
TGTGGTGCATTACACCGGGATGCTTGAGGACGGAAAGAAAGTGGACTCTTCCCGAGACCGAAATAA
ACCATTCAAGTTCATGTTGGGCAAGCAGGAGGTTATCAGAGGGTGGGAGGAGGGCGTCGCTCAGAT
GAGTGTCGGACAGAGGGCCAAGCTCACGATCTCCCCTGATTACGCCTACGGGGCAACTGGTCACCC
CGGAATCATCCCCCCTCACGCAACCCTCGTGTTCGACGTCGAGCTGCTCAAACTGGAATCAGGCGG
AGGCAGTGGCGGGTTTGGCGATGTCGGTGCCCTTGAAAGCTTGAGAGGAAATGCCGATCTCGCTTA
CATCTTGAGCATGGAGCCCTGTGGGCACTGTCTGATCATCAACAATGTTAACTTTTGCCGGGAGTCC
GGCCTGCGCACACGCACAGGCTCCAACATTGACTGCGAAAAACTTCGAAGGAGGTTTAGCTCTCTG
CATTTCATGGTAGAGGTGAAGGGGGATCTGACCGCCAAGAAAATGGTTCTCGCCCTTCTCGAGCTTG
CGCAGCAGGACCATGGAGCGCTTGACTGTTGTGTCGTTGTGATACTGAGCCATGGCTGTCAGGCTT
CCCATCTCCAGTTTCCAGGGGCCGTGTACGGAACCGATGGATGCCCTGTGTCAGTTGAAAAGATCG
TAAACATCTTTAACGGAACATCTTGCCCGAGCCTCGGCGGTAAACCGAAGCTTTTTTTTATCCAGGCC
TGCGGCGGTGAACAGAAAGATCATGGCTTCGAGGTTGCCAGTACCAGCCCTGAAGACGAATCCCCC
GGGTCAAATCCTGAACCAGATGCGACCCCTTTCCAGGAAGGACTCCGCACTTTTGACCAGCTTGAC
GCCATTTCCTCCCTGCCAACACCTTCCGACATATTTGTAAGCTACTCCACCTTTCCAGGATTCGTGAG
CTGGCGCGACCCAAAATCCGGCAGTTGGTATGTTGAAACCCTGGACGATATCTTCGAACAATGGGC
CCACAGTGAGGACCTGCAGTCCCTTCTTCTGCGCGTAGCCAATGCCGTGTCAGTCAAAGGGATTTAC
AAGCAGATGCCAGGCTGCTTTAATTTCCTGCGCAAGAAACTGTTTTTTAAGACCAGTTGA or SEQ ID
NO: 3003;
and
AGAGGCGTGCAGGTGGAAACCATCTCTCCCGGCGACGGCAGAACCTTCCCTAAGAGGGGCCAGAC
CTGCGTGGTGCACTACACCGGCATGCTGGAAGATGGCAAGAAGATGGACAGCTCCCGGGACCGGA
ACAAGCCCTTCAAGTTCATGCTGGGCAAGCAGGAAGTGATCCGGGGCTGGGAAGAGGGCGTGGCA
CAGATGTCTGTGGGCCAGAGAGCCAAGCTGACCATCAGCCCCGATTACGCCTACGGCGCCACAGG
CCACCCTGGCATCATTCCTCCACACGCCACACTGGTGTTCGATGTGGAACTGCTGAAGCTGGAAAC
CCGGGGAGTGCAGGTGGAAACAATCAGCCCTGGCGACGGCCGGACCTTTCCAAAACGGGGACAGA
CATGTGTGGTGCATTATACAGGGATGCTGGAAGATGGGAAAAAAATGGATAGCAGCCGCGACCGCA
ACAAACCTTTTAAGTTTATGCTGGGGAAACAGGAAGTGATTAGAGGCTGGGAAGAGGGGGTGGCAC
AGATGAGCGTGGGACAGCGGGCCAAACTGACAATCTCCCCCGACTATGCCTATGGGGCCACCGGA
CACCCCGGAATCATCCCACCTCATGCTACCCTGGTGTTTGACGTGGAACTGCTGAAACTGGAAACAA
GCGGCGGAGGCAGCGGCGGCTTTGGAGATGTGGGAGCCCTGGAAAGCCTGCGGGGCAATGCCGA
TCTGGCCTACATCCTGAGCATGGAACCCTGCGGCCACTGCCTGATTATCAACAACGTGAACTTCTGC
AGAGAGAGCGGCCTGCGGACCAGAACCGGCAGCAACATCGACTGCGAGAAGCTGCGGCGGAGATT
CAGCAGCCTGCACTTCATGGTGGAAGTGAAGGGGGACCTGACCGCCAAGAAAATGGTGCTGGCTCT
GCTGGAACTGGCCCAGCAGGATCATGGCGCCCTGGACTGTTGCGTGGTCGTGATCCTGAGCCACG
GCTGCCAGGCCAGCCATCTGCAGTTTCCCGGCGCTGTGTATGGCACCGATGGCTGCCCTGTGTCCG
TGGAAAAGATCGTGAATATCTTCAACGGCACCAGCTGCCCCAGCCTGGGCGGAAAGCCTAAGCTGT
TCTTTATTCAAGCCTGTGGGGGCGAGCAGAAGGACCACGGATTTGAGGTGGCCAGCACCTCCCCCG
AGGATGAGAGCCCTGGCAGCAACCCTGAGCCTGACGCCACCCCATTCCAGGAAGGACTGCGGACC
TTCGACCAGCTGGACGCCATCTCTAGCCTGCCCACCCCCAGCGACATCTTCGTGTCCTACAGCACC
TTCCCTGGCTTTGTGTCCTGGCGGGACCCCAAGTCCGGCTCTTGGTACGTGGAAACCCTGGACGAC
ATCTTTGAGCAGTGGGCCCATAGCGAGGACCTGCAGAGCCTGCTGCTGAGGGTGGCCAATGCCGT
GTCCGTGAAGGGCATCTACAAGCAGATGCCCGGCTGCTTCAACTTCCTGCGGAAGAAGCTGTTTTTC
AAGACCAGC or SEQ ID NO: 3004.

[0623] In another embodiment, the suicide gene encodes an amino acid sequence selected from the group consisting of MLEGVQVETISPGDGRTFPKRGQTCVVHYTGMLEDGKKVDSSRDRNKPFKFMLGKQEVIRGWEEGVAQ MSVGQRAKLTISPDYAYGATGHPGIIPPHATLVFDVELLKLESGGGSGASGFGDVGALESLRGNADLAYIL SMEPCGHCLIINNVNFCRESGLRTRTGSNIDCEKLRRRFSSLHFMVEVKGDLTAKKMVLALLELAQQDHG ALDCCVVVILSHGCQASHLQFPGAVYGTDGCPVSVEKIVNIFNGTSCPSLGGKPKLFFIQACGGEQKDHG FEVASTSPEDESPGSNPEPDATPFQEGLRTFDQLDAISSLPTPSDIFVSYSTFPGFVSWRDPKSGSWYVE TLDDIFEQWAHSEDLQSLLLRVANAVSVKGIYKQMPGCFNFLRKKLFFKTS or SEQ ID NO: 3005;

GVQVETISPGDGRTFPKRGQTCVVHYTGMLEDGKKVDSSRDRNKPFKFMLGKQEVIRGWEEGVAQMS VGQRAKLTISPDYAYGATGHPGIIPPHATLVFDVELLKLESGGGSGGFGDVGALESLRGNADLAYILSMEP CGHCLIINNVNFCRESGLRTRTGSNIDCEKLRRRFSSLHFMVEVKGDLTAKKMVLALLELAQQDHGALDC CVVVILSHGCQASHLQFPGAVYGTDGCPVSVEKIVNIFNGTSCPSLGGKPKLFFIQACGGEQKDHGFEVA STSPEDESPGSNPEPDATPFQEGLRTFDQLDAISSLPTPSDIFVSYSTFPGFVSWRDPKSGSWYVETLDD IFEQWAHSEDLQSLLLRVANAVSVKGIYKQMPGCFNFLRKKLFFKTS or SEQ ID NO: 3006; and
RGVQVETISPGDGRTFPKRGQTCVVHYTGMLEDGKKMDSSRDRNKPFKFMLGKQEVIRGWEEGVAQM SVGQRAKLTISPDYAYGATGHPGIIPPHATLVFDVELLKLETRGVQVETISPGDGRTFPKRGQTCVVHYTG MLEDGKKMDSSRDRNKPFKFMLGKQEVIRGWEEGVAQMSVGQRAKLTISPDYAYGATGHPGIIPPHATL VFDVELLKLETSGGGSGGFGDVGALESLRGNADLAYILSMEPCGHCLIINNVNFCRESGLRTRTGSNIDC EKLRRRFSSLHFMVEVKGDLTAKKMVLALLELAQQDHGALDCCVVVILSHGCQASHLQFPGAVYGTDGC PVSVEKIVNIFNGTSCPSLGGKPKLFFIQACGGEQKDHGFEVASTSPEDESPGSNPEPDATPFQEGLRTF DQLDAISSLPTPSDIFVSYSTFPGFVSWRDPKSGSWYVETLDDIFEQWAHSEDLQSLLLRVANAVSVKGIY KQMPGCFNFLRKKLFFKTS or SEQ ID NO: 3007. In yet another embodiment, the suicide gene has an inducible promoter.

[0624] In some embodiments, the suicide gene is in an expression vector. In an exemplary embodiment, the present invention includes a vector comprising a nucleic acid sequence comprising a suicide gene comprising SEQ ID NOs: 3001, 3002, 3003 or 3004. The expression vector may also include other genes, such as a chimeric antigen receptor and/or CRISPR system disclosed elsewhere herein.

[0625] The invention also includes a cell comprising the suicide gene. In an exemplary aspect, the present invention includes a modified cell comprising a nucleic acid comprising a suicide gene encoding an amino acid sequence selected from the group consisting of SEQ ID NO: 3005, 3006, and 3007 and a nucleic acid encoding a chimeric antigen receptor. In another aspect, the present invention includes a modified cell comprising a nucleic acid comprising a suicide gene selected from the group consisting of SEQ ID NO: 3001, 3002, 3003 and 3004 and a nucleic acid encoding a chimeric antigen receptor. In one embodiment, the suicide gene encodes an amino acid sequence selected from the group consisting of SEQ ID NO: 3005, 3006, and 3007. In another embodiment, the suicide gene has an inducible promoter.

[0626] In one embodiment, the CAR modified T cell comprises nucleic acids encoding a suicide gene as a separate nucleic acid sequence from the CAR construct described elsewhere herein. For example, HSV-TK, i-Casp9, the cytoplasmic domain of Fas, or a caspase can be incorporated into genetically engineered T cells separate from the CAR construct. In another embodiment, the CAR modified T cell comprises a suicide gene in the same construct as the nucleic acids encoding the CAR. In this embodiment, the nucleic acids comprising the suicide gene may be upstream or downstream of the nucleic acids encoding the CAR.

[0627] In one embodiment, expression of the suicide gene is activated in the cell by contacting the cell with an inducing agent administered to the cell or to a mammal comprising the cell. The inducing agent then activates an inducible promoter to express the suicide gene. In such an embodiment, the inducing agent is administered to the subject to induce expression of the suicide gene.

[0628] In another embodiment, a suicide gene product that is expressed from the suicide gene is activated by an activating agent, such as a dimerization agent. For example, the dimerization agent, such as AP20187, promotes dimerization and activation of caspase-9 molecules.

[0629] In some embodiments with constitutive expression of the suicide gene, expression of the suicide gene may be turned off in the cell by contacting the cell with an inhibiting agent administered to the cell or to a mammal comprising the cell. The inhibiting agent selectively turns off expression. For example, caspase-9 is constitutively expressed in the cell and the addition of an inhibiting agent represses expression or activation of caspase-9. In one embodiment, the inhibiting agent is administered to the subject to repress expression of the suicide gene.

[0630] In some embodiments with constitutive expression of the suicide gene, activation of the suicide gene product may be repressed in the cell by contacting the cell with an inhibiting agent, such as a solubilizing agent, administered to the cell or to a mammal comprising the cell. The inhibiting agent represses activation of the suicide gene product, such as by preventing dimerization of the caspase-9 molecules. In one embodiment, the solubilizing agent is administered to the subject to repress activation of the suicide gene product.

[0631] In some aspects, the suicide gene is not immunogenic to the cell comprising the suicide gene or host harboring the suicide gene. Although thymidine kinase (TK) may be employed, it can be immunogenic. Alternatively, examples of suicide genes that are not immunogenic to the host include caspase-9, caspase-8, and cytosine deaminase.

[0632] In yet another embodiment, suicide gene expression is linked in tandem to one or more dimerization domains, which cause aggregation of the fusion protein containing the suicide domain and the dimerization domain, preventing cell-surface expression and hence function of the suicide gene.

[0633] In yet another embodiment, the nucleic acid sequence encoding a dimerization domain, linked to a suicide gene, comprises the nucleic acid sequence selected from the group consisting of

### GGAAGCGGCGCCACCAATTTCAGCCTGCTGAAACAGGCCGGCGACGTGGAAGAGAACCCTGGCCC T or SEQ ID NO: 3008;

### AGTGGCTCCGGCGCAACAAATTTCTCCTTGCTGAAACAGGCAGGCGACGTTGAGGAAAATCCCGGC CCA or SEQ ID NO: 3009;

### GGCTCCGGCGCAACAAATTTCTCCTTGCTGAAACAGGCAGGCGACGTTGAGGAAAATCCCGGCCCA or SEQ ID NO: 3010; GGGGTTCAGGTGGAGACTATCAGCCCGGGCGA or SEQ ID NO: 3011; and

[0634] GGCTCCGGCGCAACAAATTTCTCCTTGCTGAAACAGGCAGGCGACGTTGAGGAAAATCCCGGCCCA or SEQ ID NO: 3012. In another such embodiment, the dimerization domain, linked to a suicide domain, comprises the amino acid sequence selected from the group consisting of

SEQ ID NO: 3013
GSGATNFSLLKQAGDVEENPGP;
or
and
SEQ ID NO: 3014
RKRRGSGATNFSLLKQAGDVEENPGP.
or

[0635] Solubilization of the dimerization domains, with a solubilizing agent, administered to the cell or to a mammal comprising the cell, prevents aggregation and allows the construct to egress through the secretory system.

[0636] As described herein, the present invention includes a method of modifying a T cell with a chimeric antigen receptor (CAR) and a suicide gene. Thus, the present invention encompasses a nucleic acid encoding a CAR or a modified T cell comprising a CAR, wherein the CAR includes an antigen binding domain, a transmembrane domain and an intracellular domain.

[0637] One or more domains or a fragment of a domain of the CAR may be human. In one embodiment, the present invention includes a fully human CAR. The nucleic acid sequences coding for the desired domains can be obtained using recombinant methods known in the art, such as, for example by screening libraries from cells expressing the gene, by deriving the gene from a vector known to include the same, or by isolating directly from cells and tissues containing the same, using standard techniques. Alternatively, the gene of interest can be produced synthetically, rather than as a cloned molecule.

[0638] Example of CARs are described in U.S. Pat. Nos. 8,911,993, 8,906,682, 8,975,071, 8,916,381, 9,102,760, 9,101,584, and 9,102,761, all of which are incorporated herein by reference in their entireties.

### Nucleic Acid and Vectors

[0639] In another aspect, the invention pertains to a nucleic acid encoding any of the fusion proteins described herein, or a vector comprising such a nucleic acid. In one embodiment, the vector is chosen from a DNA vector, an RNA vector, a plasmid, a lentivirus vector, adenoviral vector, or a retrovirus vector. In one embodiment, the vector is a lentivirus vector.

[0640] In some embodiments, the nucleic acids described herein include a sequence encoding a furin cleavage site. In some embodiments, the nucleic acids described herein include any one of SEQ ID NOs: 1112, 126, 128, 130, 132, 134, 136, or 138, or a sequence having at least 90%, 95%, 97%, 98%, or 99% identity thereto. In some embodiments, the nucleic acids described herein include any one of SEQ ID NOs: 1112, 126, 128, 130, 132, 134, 136, or 138. In some embodiments, the nucleic acids described herein include SEQ ID NO: 126 or SEQ ID NO: 128. In some embodiments, the nucleic acids described herein include SEQ ID NO: 126.

[0641] In some embodiments, the nucleic acids described herein include a sequence encoding a conditional expression domain, e.g., an aggregation domain or a degradation domain. In some embodiments, the nucleic acids described herein include a sequence encoding an aggregation domain derived from FKBP, e.g., FKBP F36M. In some embodiments, the nucleic acids described herein include a sequence encoding a degradation domain derived from an estrogen receptor (ER). In some embodiments, the nucleic acids described herein include SEQ ID NO: 1110 or SEQ ID NO: 122, or a sequence having at least 90%, 95%, 97%, 98%, or 99% identity thereto. In some embodiments, the nucleic acids described herein include SEQ ID NO: 1110 or SEQ ID NO: 122. In some embodiments, the nucleic acids described herein include SEQ ID NO: 122.

[0642] The present disclosure also provides vectors in which a DNA of the present disclosure is inserted. Vectors derived from retroviruses such as the lentivirus are suitable tools to achieve long-term gene transfer since they allow long-term, stable integration of a transgene and its propagation in daughter cells. Lentiviral vectors have the added advantage over vectors derived from onco-retroviruses such as murine leukemia viruses in that they can transduce non-proliferating cells, such as hepatocytes. They also have the added advantage of low immunogenicity. A retroviral vector may also be, e.g., a gammaretroviral vector. A gammaretroviral vector may include, e.g., a promoter, a packaging signal (ψ), a primer binding site (PBS), one or more (e.g., two) long terminal repeats (LTR), and a transgene of interest, e.g., a gene encoding a CAR. A gammaretroviral vector may lack viral structural gens such as gag, pol, and env. Exemplary gammaretroviral vectors include Murine Leukemia Virus (MLV), Spleen-Focus Forming Virus (SFFV), and Myeloproliferative Sarcoma Virus (MPSV), and vectors derived therefrom. Other gammaretroviral vectors are described, e.g., in Tobias Maetzig et al., “Gammaretroviral Vectors: Biology, Technology and Application” Viruses. 2011 June; 3(6): 677-713.

[0643] In another embodiment, the vector comprising the nucleic acid encoding the desired fusion protein of the invention is an adenoviral vector (A5/35). In another embodiment, the expression of nucleic acids encoding chimeric molecules can be accomplished using of transposons such as sleeping beauty, crisper, CAS9, and zinc finger nucleases. See below June et al. 2009 Nature Reviews Immunology 9.10: 704-716, is incorporated herein by reference.

[0644] The nucleic acid can be cloned into a number of types of vectors. For example, the nucleic acid can be cloned into a vector including, but not limited to a plasmid, a phagemid, a phage derivative, an animal virus, and a cosmid. Vectors of particular interest include expression vectors, replication vectors, probe generation vectors, and sequencing vectors.

[0645] Disclosed herein are methods for producing an in vitro transcribed RNA chimeric molecule. The present disclosure also includes a chimeric molecule encoding RNA construct that can be directly transfected into a cell. A method for generating mRNA for use in transfection can involve in vitro transcription (IVT) of a template with specially designed primers, followed by polyA addition, to produce a construct containing 3′ and 5′ untranslated sequence (“UTR”), a 5′ cap and/or Internal Ribosome Entry Site (IRES), the nucleic acid to be expressed, and a polyA tail, typically 50-5000 bases in length (SEQ ID NO:32). RNA so produced can efficiently transfect different kinds of cells. In one aspect, the template includes sequences for the CAR.

[0646] Nucleic Acid Constructs Encoding a Fusion Protein Comprising a CAR

[0647] The present disclosure also provides nucleic acid molecules encoding a fusion protein, e.g., as described herein, comprising a domain that includes one or more of the CAR constructs targeting an antigen described herein. In one aspect, the nucleic acid molecule is provided as a messenger RNA transcript. In one aspect, the nucleic acid molecule is provided as a DNA construct.

[0648] Accordingly, in one aspect, the invention pertains to a nucleic acid molecule encoding a fusion protein, e.g., as described herein, comprising a chimeric antigen receptor (CAR), wherein the CAR comprises an antigen binding domain that binds to an antigen described herein, a transmembrane domain (e.g., a transmembrane domain described herein), and an intracellular signaling domain (e.g., an intracellular signaling domain described herein) comprising a stimulatory domain, e.g., a costimulatory signaling domain (e.g., a costimulatory signaling domain described herein) and/or a primary signaling domain (e.g., a primary signaling domain described herein, e.g., a zeta chain described herein). In one embodiment, the transmembrane domain is transmembrane domain of a protein selected from the group consisting of the alpha, beta or zeta chain of the T-cell receptor, CD28, CD3 epsilon, CD45, CD4, CD5, CD8, CD9, CD16, CD22, CD33, CD37, CD64, CD80, CD86, CD134, CD137 and CD154. In some embodiments, a transmembrane domain may include at least the transmembrane region(s) of, e.g., KIRDS2, OX40, CD2, CD27, LFA-1 (CD11a, CD18), ICOS (CD278), 4-1BB (CD137), GITR, CD40, BAFFR, HVEM (LIGHTR), SLAMF7, NKp80 (KLRF1), NKp44, NKp30, NKp46, CD160, CD19, IL2R beta, IL2R gamma, IL7R α, ITGA1, VLA1, CD49a, ITGA4, IA4, CD49D, ITGA6, VLA-6, CD49f, ITGAD, CD11d, ITGAE, CD103, ITGAL, CD11a, LFA-1, ITGAM, CD11 b, ITGAX, CD11c, ITGB1, CD29, ITGB2, CD18, LFA-1, ITGB7, NKG2D, NKG2C, TNFR2, DNAM1 (CD226), SLAMF4 (CD244, 2B4), CD84, CD96 (Tactile), CEACAM1, CRTAM, Ly9 (CD229), CD160 (BY55), PSGL1, CD100 (SEMA4D), SLAMF6 (NTB-A, Ly108), SLAM (SLAMF1, CD150, IPO-3), BLAME (SLAMF8), SELPLG (CD162), LTBR, PAG/Cbp, NKG2D, and NKG2C.

[0649] In one embodiment, the transmembrane domain comprises a sequence of SEQ ID NO: 12, or a sequence with 95-99% identity thereof. In one embodiment, the antigen binding domain is connected to the transmembrane domain by a hinge region, e.g., a hinge described herein. In one embodiment, the hinge region comprises SEQ ID NO:4 or SEQ ID NO:6 or SEQ ID NO:8 or SEQ ID NO:10, or a sequence with 95-99% identity thereof. In one embodiment, the isolated nucleic acid molecule further comprises a sequence encoding a costimulatory domain. In one embodiment, the costimulatory domain is a functional signaling domain of a protein selected from the group consisting of OX40, CD27, CD28, CDS, ICAM-1, LFA-1 (CD11a/CD18), ICOS (CD278), and 4-1BB (CD137). Further examples of such costimulatory molecules include CDS, ICAM-1, GITR, BAFFR, HVEM (LIGHTR), SLAMF7, NKp80 (KLRF1), NKp44, NKp30, NKp46, CD160, CD19, CD4, CD8alpha, CD8beta, IL2R beta, IL2R gamma, IL7R alpha, ITGA4, VLA1, CD49a, ITGA4, IA4, CD49D, ITGA6, VLA-6, CD49f, ITGAD, CD11d, ITGAE, CD103, ITGAL, CD11a, LFA-1, ITGAM, CD11 b, ITGAX, CD11c, ITGB1, CD29, ITGB2, CD18, LFA-1, ITGB7, NKG2D, NKG2C, TNFR2, TRANCE/RANKL, DNAM1 (CD226), SLAMF4 (CD244, 2B4), CD84, CD96 (Tactile), CEACAM1, CRTAM, Ly9 (CD229), CD160 (BY55), PSGL1, CD100 (SEMA4D), CD69, SLAMF6 (NTB-A, Ly108), SLAM (SLAMF1, CD150, IPO-3), BLAME (SLAMF8), SELPLG (CD162), LTBR, LAT, GADS, SLP-76, PAG/Cbp, NKG2D, and NKG2C. In one embodiment, the intracellular signaling domain comprises a functional signaling domain of 4-1BB and a functional signaling domain of CD3 zeta. In one embodiment, the intracellular signaling domain comprises the sequence of SEQ ID NO: 14, 16, 120, or 124, or a sequence with 95-99% identity thereof, and the sequence of SEQ ID NO: 18 or SEQ ID NO:20, or a sequence with 95-99% identity thereof, wherein the sequences comprising the intracellular signaling domain are expressed in the same frame and as a single polypeptide chain.

[0650] In another aspect, the invention pertains to an isolated nucleic acid molecule encoding a fusion protein, e.g., as described herein, comprising a domain that includes a CAR construct comprising a leader sequence of SEQ ID NO: 2, a scFv domain as described herein, a hinge region of SEQ ID NO:4 or SEQ ID NO:6 or SEQ ID NO:8 or SEQ ID NO:10 (or a sequence with 95-99% identity thereof), a transmembrane domain having a sequence of SEQ ID NO: 12 (or a sequence with 95-99% identity thereof), a 4-1BB costimulatory domain having a sequence of SEQ ID NO:14, a CD27 costimulatory domain having a sequence of SEQ ID NO:16 (or a sequence with 95-99% identity thereof), a ICOS costimulatory domain having a sequence of SEQ ID NO: 120 (or a sequence with 95-99% identity thereof) or a CD28 costimulatory domain having a sequence of SEQ ID NO:124, and a CD3 zeta stimulatory domain having a sequence of SEQ ID NO:18 or SEQ ID NO:20 (or a sequence with 95-99% identity thereof).

[0651] The nucleic acid sequences coding for the desired molecules can be obtained using recombinant methods known in the art, such as, for example by screening libraries from cells expressing the gene, by deriving the gene from a vector known to include the same, or by isolating directly from cells and tissues containing the same, using standard techniques. Alternatively, the gene of interest can be produced synthetically, rather than cloned.

[0652] The present disclosure also provides vectors in which a nucleic acid of the present disclosure is inserted. Vectors derived from retroviruses such as the lentivirus are suitable tools to achieve long-term gene transfer since they allow long-term, stable integration of a transgene and its propagation in daughter cells. Lentiviral vectors have the added advantage over vectors derived from onco-retroviruses such as murine leukemia viruses in that they can transduce non-proliferating cells, such as hepatocytes. They also have the added advantage of low immunogenicity.

[0653] In another embodiment, the vector comprising the nucleic acid encoding a fusion protein, e.g., as described herein, comprising a domain that includes a CAR of the invention is an adenoviral vector

[0654] (A5/35). In another embodiment, the expression of nucleic acids encoding CARs can be accomplished using of transposons such as sleeping beauty, crispr/CAS9, and zinc finger nucleases. See below June et al. 2009 Nature Reviews Immunology 9.10: 704-716, is incorporated herein by reference.

[0655] In brief summary, the expression of natural or synthetic nucleic acids encoding a fusion protein, e.g., as described herein, comprising a domain that includes CARs is typically achieved by operably linking a nucleic acid encoding the CAR polypeptide or portions thereof to a promoter, and incorporating the construct into an expression vector. The vectors can be suitable for replication and integration eukaryotes. Typical cloning vectors contain transcription and translation terminators, initiation sequences, and promoters useful for regulation of the expression of the desired nucleic acid sequence.

[0656] The expression constructs of the present disclosure may also be used for nucleic acid immunization and gene therapy, using standard gene delivery protocols. Methods for gene delivery are known in the art. See, e.g., U.S. Pat. Nos. 5,399,346, 5,580,859, 5,589,466, incorporated by reference herein in their entireties. In another embodiment, the invention provides a gene therapy vector.

[0657] The nucleic acid can be cloned into a number of types of vectors. For example, the nucleic acid can be cloned into a vector including, but not limited to a plasmid, a phagemid, a phage derivative, an animal virus, and a cosmid. Vectors of particular interest include expression vectors, replication vectors, probe generation vectors, and sequencing vectors.

[0658] Further, the expression vector may be provided to a cell in the form of a viral vector. Viral vector technology is well known in the art and is described, for example, in Sambrook et al., 2012, MOLECULAR CLONING: A LABORATORY MANUAL, volumes 1-4, Cold Spring Harbor Press, NY), and in other virology and molecular biology manuals. Viruses, which are useful as vectors include, but are not limited to, retroviruses, adenoviruses, adeno-associated viruses, herpes viruses, and lentiviruses. In general, a suitable vector contains an origin of replication functional in at least one organism, a promoter sequence, convenient restriction endonuclease sites, and one or more selectable markers, (e.g., WO 01/96584; WO 01/29058; and U.S. Pat. No. 6,326,193).

[0659] A number of viral based systems have been developed for gene transfer into mammalian cells. For example, retroviruses provide a convenient platform for gene delivery systems. A selected gene can be inserted into a vector and packaged in retroviral particles using techniques known in the art. The recombinant virus can then be isolated and delivered to cells of the subject either in vivo or ex vivo. A number of retroviral systems are known in the art. In some embodiments, adenovirus vectors are used. A number of adenovirus vectors are known in the art. In one embodiment, lentivirus vectors are used.

[0660] Additional promoter elements, e.g., enhancers, regulate the frequency of transcriptional initiation. Typically, these are located in the region 30-110 bp upstream of the start site, although a number of promoters have been shown to contain functional elements downstream of the start site as well. The spacing between promoter elements frequently is flexible, so that promoter function is preserved when elements are inverted or moved relative to one another. In the thymidine kinase (tk) promoter, the spacing between promoter elements can be increased to 50 bp apart before activity begins to decline. Depending on the promoter, it appears that individual elements can function either cooperatively or independently to activate transcription. Exemplary promoters include the CMV IE gene, EF-1α, ubiquitin C, or phosphoglycerokinase (PG K) promoters.

[0661] An example of a promoter that is capable of expressing a fusion protein, e.g., as described herein, comprising a domain that includes a CAR encoding nucleic acid molecule in a mammalian T cell is the EF1a promoter. The native EF1a promoter drives expression of the alpha subunit of the elongation factor-1 complex, which is responsible for the enzymatic delivery of aminoacyl tRNAs to the ribosome. The EF1a promoter has been extensively used in mammalian expression plasmids and has been shown to be effective in driving expression of a fusion protein, e.g., as described herein, a fusion protein comprising a domain that includes a CAR, from nucleic acid molecules cloned into a lentiviral vector. See, e.g., Milone et al., Mol. Ther. 17(8): 1453-1464 (2009). In one aspect, the EF1a promoter comprises the sequence provided as SEQ ID NO:1.

[0662] Another example of a promoter is the immediate early cytomegalovirus (CMV) promoter sequence. This promoter sequence is a strong constitutive promoter sequence capable of driving high levels of expression of any polynucleotide sequence operatively linked thereto. However, other constitutive promoter sequences may also be used, including, but not limited to the simian virus 40 (SV40) early promoter, mouse mammary tumor virus (MMTV), human immunodeficiency virus (HIV) long terminal repeat (LTR) promoter, MoMuLV promoter, an avian leukemia virus promoter, an Epstein-Barr virus immediate early promoter, a Rous sarcoma virus promoter, as well as human gene promoters such as, but not limited to, the actin promoter, the myosin promoter, the elongation factor-1□ promoter, the hemoglobin promoter, and the creatine kinase promoter. Further, the invention should not be limited to the use of constitutive promoters. Inducible promoters are also contemplated as part of the invention. The use of an inducible promoter provides a molecular switch capable of turning on expression of the polynucleotide sequence which it is operatively linked when such expression is desired, or turning off the expression when expression is not desired. Examples of inducible promoters include, but are not limited to a metallothionine promoter, a glucocorticoid promoter, a progesterone promoter, and a tetracycline promoter.

[0663] Another example of a promoter is the phosphoglycerate kinase (PGK) promoter. In embodiments, a truncated PGK promoter (e.g., a PGK promoter with one or more, e.g., 1, 2, 5, 10, 100, 200, 300, or 400, nucleotide deletions when compared to the wild-type PGK promoter sequence) may be desired. The nucleotide sequences of exemplary PGK promoters are provided below.

WT PGK Promoter
(SEQ ID NO: 185)
ACCCCTCTCTCCAGCCACTAAGCCAGTTGCTCCCTCGGCTGACGGCTGCAC
GCGAGGCCTCCGAACGTCTTACGCCTTGTGGCGCGCCCGTCCTTGTCCCGG
GTGTGATGGCGGGGTGTGGGGCGGAGGGCGTGGCGGGGAAGGGCCGGCGAC
GAGAGCCGCGCGGGACGACTCGTCGGCGATAACCGGTGTCGGGTAGCGCCA
GCCGCGCGACGGTAACGAGGGACCGCGACAGGCAGACGCTCCCATGATCAC
TCTGCACGCCGAAGGCAAATAGTGCAGGCCGTGCGGCGCTTGGCGTTCCTT
GGAAGGGCTGAATCCCCGCCTCGTCCTTCGCAGCGGCCCCCCGGGTGTTCC
CATCGCCGCTTCTAGGCCCACTGCGACGCTTGCCTGCACTTCTTACACGCT
CTGGGTCCCAGCCGCGGCGACGCAAAGGGCCTTGGTGCGGGTCTCGTCGGC
GCAGGGACGCGTTTGGGTCCCGACGGAACCTTTTCCGCGTTGGGGTTGGGG
CACCATAAGCT

[0664] Exemplary Truncated PGK Promoters:

PGK100:
(SEQ ID NO: 186)
ACCCCTCTCTCCAGCCACTAAGCCAGTTGCTCCCTCGGCTGACGGCTGCAC
GCGAGGCCTCCGAACGTCTTACGCCTTGTGGCGCGCCCGTCCTTGTCCCGG
GTGTGATGGCGGGGTG
PGK200:
(SEQ ID NO: 187)
ACCCCTCTCTCCAGCCACTAAGCCAGTTGCTCCCTCGGCTGACGGCTGCAC
GCGAGGCCTCCGAACGTCTTACGCCTTGTGGCGCGCCCGTCCTTGTCCCGG
GTGTGATGGCGGGGTGTGGGGCGGAGGGCGTGGCGGGGAAGGGCCGGCGAC
GAGAGCCGCGCGGGACGACTCGTCGGCGATAACCGGTGTCGGGTAGCGCCA
GCCGCGCGACGGTAACG
PGK300:
(SEQ ID NO: 188)
ACCCCTCTCTCCAGCCACTAAGCCAGTTGCTCCCTCGGCTGACGGCTGCAC
GCGAGGCCTCCGAACGTCTTACGCCTTGTGGCGCGCCCGTCCTTGTCCCGG
GTGTGATGGCGGGGTGTGGGGCGGAGGGCGTGGCGGGGAAGGGCCGGCGAC
GAGAGCCGCGCGGGACGACTCGTCGGCGATAACCGGTGTCGGGTAGCGCCA
GCCGCGCGACGGTAACGAGGGACCGCGACAGGCAGACGCTCCCATGATCAC
TCTGCACGCCGAAGGCAAATAGTGCAGGCCGTGCGGCGCTTGGCGTTCCTT
GGAAGGGCTGAATCCCCG
PGK400:
(SEQ ID NO: 189)
ACCCCTCTCTCCAGCCACTAAGCCAGTTGCTCCCTCGGCTGACGGCTGCAC
GCGAGGCCTCCGAACGTCTTACGCCTTGTGGCGCGCCCGTCCTTGTCCCGG
GTGTGATGGCGGGGTGTGGGGCGGAGGGCGTGGCGGGGAAGGGCCGGCGAC
GAGAGCCGCGCGGGACGACTCGTCGGCGATAACCGGTGTCGGGTAGCGCCA
GCCGCGCGACGGTAACGAGGGACCGCGACAGGCAGACGCTCCCATGATCAC
TCTGCACGCCGAAGGCAAATAGTGCAGGCCGTGCGGCGCTTGGCGTTCCTT
GGAAGGGCTGAATCCCCGCCTCGTCCTTCGCAGCGGCCCCCCGGGTGTTCC
CATCGCCGCTTCTAGGCCCACTGCGACGCTTGCCTGCACTTCTTACACGCT
CTGGGTCCCAGCCG

[0665] A vector may also include, e.g., a signal sequence to facilitate secretion, a polyadenylation signal and transcription terminator (e.g., from Bovine Growth Hormone (BGH) gene), an element allowing episomal replication and replication in prokaryotes (e.g. SV40 origin and ColE1 or others known in the art) and/or elements to allow selection (e.g., ampicillin resistance gene and/or zeocin marker).

[0666] In order to assess the expression of a fusion protein, e.g., as described herein, comprising a domain that includes a CAR polypeptide or portions thereof, the expression vector to be introduced into a cell can also contain either a selectable marker gene or a reporter gene or both to facilitate identification and selection of expressing cells from the population of cells sought to be transfected or infected through viral vectors. In other aspects, the selectable marker may be carried on a separate piece of DNA and used in a co-transfection procedure. Both selectable markers and reporter genes may be flanked with appropriate regulatory sequences to enable expression in the host cells. Useful selectable markers include, for example, antibiotic-resistance genes, such as neo and the like.

[0667] Reporter genes are used for identifying potentially transfected cells and for evaluating the functionality of regulatory sequences. In general, a reporter gene is a gene that is not present in or expressed by the recipient organism or tissue and that encodes a polypeptide whose expression is manifested by some easily detectable property, e.g., enzymatic activity. Expression of the reporter gene is assayed at a suitable time after the DNA has been introduced into the recipient cells. Suitable reporter genes may include genes encoding luciferase, beta-galactosidase, chloramphenicol acetyl transferase, secreted alkaline phosphatase, or the green fluorescent protein gene (e.g., Ui-Tei et al., 2000 FEBS Letters 479: 79-82). Suitable expression systems are well known and may be prepared using known techniques or obtained commercially. In general, the construct with the minimal 5′ flanking region showing the highest level of expression of reporter gene is identified as the promoter. Such promoter regions may be linked to a reporter gene and used to evaluate agents for the ability to modulate promoter-driven transcription.

[0668] In some embodiments, the a vector comprising a nucleic acid sequence encoding a fusion protein described herein, e.g., a fusion protein comprising a CAR molecule described herein, can further comprise a second nucleic acid sequence encoding a polypeptide, e.g., an agent that increases the activity of the fusion protein, e.g., as described herein, comprising a domain that includes CAR molecule. In some embodiments a single nucleic acid molecule, or vector comprising said nucleic acid molecule, encodes multiple fusion proteins, e.g., as described herein, each comprising domains that include a CAR, described herein. In some embodiments, the nucleic acid encoding the a first fusion protein is under separate regulatory control (e.g., by a promoter described herein) from the nucleic acid encoding a second fusion protein (e.g., by a promoter described herein). In other embodiments, the two or more nucleic acid sequences are encoded by a single nucleic molecule in the same frame and as a single polypeptide chain. In this aspect, the two or more fusion proteins, e.g., as described herein, each comprising a domain that includes a CAR, can, e.g., be separated by one or more peptide cleavage sites (e.g., an auto-cleavage site or a substrate for an intracellular protease). Examples of peptide cleavage sites include the following, wherein the GSG residues are optional:

T2A:
(SEQ ID NO: 190)
(GSG)E G R G S L L T C G D V E E N P G P
P2A:
(SEQ ID NO: 191)
(GSG)A T N F S L L K Q A G D V E E N P G P
E2A:
(SEQ ID NO: 192)
(GSG)Q C T N Y A L L K L A G D V E S N P G P
F2A:
(SEQ ID NO: 193)
(GSG)V K Q T L N F D L L K L A G D V E S N P G P

[0669] Methods of introducing and expressing genes into a cell are known in the art. In the context of an expression vector, the vector can be readily introduced into a host cell, e.g., mammalian, bacterial, yeast, or insect cell by any method in the art. For example, the expression vector can be transferred into a host cell by physical, chemical, or biological means.

[0670] Physical methods for introducing a polynucleotide into a host cell include calcium phosphate precipitation, lipofection, particle bombardment, microinjection, electroporation, and the like. Methods for producing cells comprising vectors and/or exogenous nucleic acids are well-known in the art. See, for example, Sambrook et al., 2012, MOLECULAR CLONING: A LABORATORY MANUAL, volumes 1-4, Cold Spring Harbor Press, N.Y.). A preferred method for the introduction of a polynucleotide into a host cell is calcium phosphate transfection or electroporation.

[0671] Biological methods for introducing a polynucleotide of interest into a host cell include the use of DNA and RNA vectors. Viral vectors, and especially retroviral vectors, have become the most widely used method for inserting genes into mammalian, e.g., human cells. Other viral vectors can be derived from lentivirus, poxviruses, herpes simplex virus I, adenoviruses and adeno-associated viruses, and the like. See, for example, U.S. Pat. Nos. 5,350,674 and 5,585,362.

[0672] Chemical means for introducing a polynucleotide into a host cell include colloidal dispersion systems, such as macromolecule complexes, nanocapsules, microspheres, beads, and lipid-based systems including oil-in-water emulsions, micelles, mixed micelles, and liposomes. An exemplary colloidal system for use as a delivery vehicle in vitro and in vivo is a liposome (e.g., an artificial membrane vesicle). Other methods of state-of-the-art targeted delivery of nucleic acids are available, such as delivery of polynucleotides with targeted nanoparticles or other suitable sub-micron sized delivery system.

[0673] In the case where a non-viral delivery system is utilized, an exemplary delivery vehicle is a liposome. The use of lipid formulations is contemplated for the introduction of the nucleic acids into a host cell (in vitro, ex vivo or in vivo). In another aspect, the nucleic acid may be associated with a lipid. The nucleic acid associated with a lipid may be encapsulated in the aqueous interior of a liposome, interspersed within the lipid bilayer of a liposome, attached to a liposome via a linking molecule that is associated with both the liposome and the oligonucleotide, entrapped in a liposome, complexed with a liposome, dispersed in a solution containing a lipid, mixed with a lipid, combined with a lipid, contained as a suspension in a lipid, contained or complexed with a micelle, or otherwise associated with a lipid. Lipid, lipid/DNA or lipid/expression vector associated compositions are not limited to any particular structure in solution. For example, they may be present in a bilayer structure, as micelles, or with a “collapsed” structure. They may also simply be interspersed in a solution, possibly forming aggregates that are not uniform in size or shape. Lipids are fatty substances which may be naturally occurring or synthetic lipids. For example, lipids include the fatty droplets that naturally occur in the cytoplasm as well as the class of compounds which contain long-chain aliphatic hydrocarbons and their derivatives, such as fatty acids, alcohols, amines, amino alcohols, and aldehydes.

[0674] Lipids suitable for use can be obtained from commercial sources. For example, dimyristyl phosphatidylcholine (“DMPC”) can be obtained from Sigma, St. Louis, Mo.; dicetyl phosphate (“DCP”) can be obtained from K & K Laboratories (Plainview, N.Y.); cholesterol (“Choi”) can be obtained from Calbiochem-Behring; dimyristyl phosphatidylglycerol (“DMPG”) and other lipids may be obtained from Avanti Polar Lipids, Inc. (Birmingham, Ala.). Stock solutions of lipids in chloroform or chloroform/methanol can be stored at about −20° C. Chloroform is used as the only solvent since it is more readily evaporated than methanol. “Liposome” is a generic term encompassing a variety of single and multilamellar lipid vehicles formed by the generation of enclosed lipid bilayers or aggregates. Liposomes can be characterized as having vesicular structures with a phospholipid bilayer membrane and an inner aqueous medium. Multilamellar liposomes have multiple lipid layers separated by aqueous medium. They form spontaneously when phospholipids are suspended in an excess of aqueous solution. The lipid components undergo self-rearrangement before the formation of closed structures and entrap water and dissolved solutes between the lipid bilayers (Ghosh et al., 1991 Glycobiology 5: 505-10). However, compositions that have different structures in solution than the normal vesicular structure are also encompassed. For example, the lipids may assume a micellar structure or merely exist as nonuniform aggregates of lipid molecules. Also contemplated are lipofectamine-nucleic acid complexes.

[0675] Regardless of the method used to introduce exogenous nucleic acids into a host cell or otherwise expose a cell to the inhibitor of the present disclosure, in order to confirm the presence of the recombinant DNA sequence in the host cell, a variety of assays may be performed. Such assays include, for example, “molecular biological” assays well known to those of skill in the art, such as Southern and Northern blotting, RT-PCR and PCR; “biochemical” assays, such as detecting the presence or absence of a particular peptide, e.g., by immunological means (ELISAs and Western blots) or by assays described herein to identify agents falling within the scope of the invention.

[0676] The present disclosure further provides a vector comprising a fusion protein, e.g., as described herein, comprising a domain that includes a CAR-encoding nucleic acid molecule. In one embodiment, the vector comprises a CAR encoding nucleic acid molecule, e.g., as described herein. In one embodiment, the vector comprises two CAR encoding nucleic acid molecules. In one aspect, the one or more CAR vectors (e.g., the vector comprising a first CAR encoding nucleic acid molecule and the vector comprising a second CAR encoding nucleic acid molecule, or the vector comprising both a first and second CAR encoding nucleic acids) can be directly transduced into a cell, e.g., a T cell or a NK cell. In one aspect, the vector is a cloning or expression vector, e.g., a vector including, but not limited to, one or more plasmids (e.g., expression plasmids, cloning vectors, minicircles, minivectors, double minute chromosomes), retroviral and lentiviral vector constructs. In one aspect, the vector is capable of expressing the CAR construct in mammalian immune effector cells (e.g., T cells, NK cells).

[0677] In one embodiment, where stable expression of one or more (e.g., one or two)fusion proteins, e.g., as described herein, each comprising a domain that includes a CAR, is desired, a vector comprising one or more (e.g., one or two) CAR-encoding nucleic acid molecules is transduced into an immune effector cell. For example, immune effector cells with stable expression of two fusion proteins, e.g., as described herein, each comprising a domain that include a CAR, can be generated using lentiviral vectors. Cells that exhibit stable expression of a two fusion proteins, e.g., as described herein, each comprising a domain that includes a CAR, express the CARs for at least 1 week, 2 weeks, 3 weeks, 4 weeks, 5 weeks, 6 weeks, 7 weeks, 8 weeks, 3 months, 6 months, 9 months, or 12 months after transduction.

[0678] In one embodiment, where transient expression of one or more (e.g., one or two) fusion proteins, e.g., as described herein, comprising a domain that includes a CAR is desired, one or more (e.g., one or two) a fusion protein-encoding nucleic acid molecules is transfected into an immune effector cell. The one or more (e.g., one or two) fusion proteins, e.g., as described herein, comprising a domain that includes a CAR-encoding nucleic acid molecules may be a vector comprising a one or more (e.g., one or two) CAR encoding nucleic acid molecules, or an in vitro transcribed RNA one or more (e.g., one or two) CARs. In vitro transcribed RNA CARs and methods for transfection into immune effector cells are further described below. Cells that exhibit transient expression of a one or more (e.g., one or two) CAR express the one or more (e.g., one or two) CAR for 4, 5, 6, 7, 8, 9, 10, 11, 12, 13, 14, 15 days after transfection.

[0679] RNA Transfection

[0680] Disclosed herein are methods for producing an in vitro transcribed RNA encoding a fusion protein, e.g., as described herein, comprising a domain that includes a CAR. The present disclosure also includes a fusion protein, e.g., as described herein, comprising a domain that includes CAR-encoding RNA construct that can be directly transfected into a cell. A method for generating mRNA for use in transfection can involve in vitro transcription (IVT) of a template with specially designed primers, followed by polyA addition, to produce a construct containing 3′ and 5′ untranslated sequence (“UTR”), a 5′ cap and/or Internal Ribosome Entry Site (IRES), the nucleic acid to be expressed, and a polyA tail, typically 50-5000 bases in length (SEQ ID NO: 32). RNA so produced can efficiently transfect different kinds of cells. In one aspect, the template includes sequences for the CAR.

[0681] In one aspect, a fusion protein, e.g., as described herein, comprising a domain that includes a CAR, of the present disclosure is encoded by a messenger RNA (mRNA). In one aspect, the mRNA encoding a CAR described herein is introduced into a T cell or a NK cell.

[0682] In one embodiment, the in vitro transcribed RNA encoding a fusion protein, e.g., as described herein, comprising a domain that includes a CAR can be introduced to a cell as a form of transient transfection. The RNA is produced by in vitro transcription using a polymerase chain reaction (PCR)-generated template. DNA of interest from any source can be directly converted by PCR into a template for in vitro mRNA synthesis using appropriate primers and RNA polymerase. The source of the DNA can be, for example, genomic DNA, plasmid DNA, phage DNA, cDNA, synthetic DNA sequence or any other appropriate source of DNA. The desired template for in vitro transcription is a fusion protein, e.g., as described herein, comprising a domain that includes a CAR, described herein. For example, the template for the RNA CAR comprises an extracellular region comprising a single chain variable domain of an antibody to an antigen described herein; a hinge region (e.g., a hinge region described herein), a transmembrane domain (e.g., a transmembrane domain described herein such as a transmembrane domain of CD8a); and a cytoplasmic region that includes an intracellular signaling domain, e.g., an intracellular signaling domain described herein, e.g., comprising the signaling domain of CD3-zeta and the signaling domain of 4-1BB.

[0683] In one embodiment, the DNA to be used for PCR contains an open reading frame. The DNA can be from a naturally occurring DNA sequence from the genome of an organism. In one embodiment, the nucleic acid can include some or all of the 5′ and/or 3′ untranslated regions (UTRs). The nucleic acid can include exons and introns. In one embodiment, the DNA to be used for PCR is a human nucleic acid sequence. In another embodiment, the DNA to be used for PCR is a human nucleic acid sequence including the 5′ and 3′ UTRs. The DNA can alternatively be an artificial DNA sequence that is not normally expressed in a naturally occurring organism. An exemplary artificial DNA sequence is one that contains portions of genes that are ligated together to form an open reading frame that encodes a fusion protein. The portions of DNA that are ligated together can be from a single organism or from more than one organism.

[0684] PCR is used to generate a template for in vitro transcription of mRNA which is used for transfection. Methods for performing PCR are well known in the art. Primers for use in PCR are designed to have regions that are substantially complementary to regions of the DNA to be used as a template for the PCR. “Substantially complementary,” as used herein, refers to sequences of nucleotides where a majority or all of the bases in the primer sequence are complementary, or one or more bases are non-complementary, or mismatched. Substantially complementary sequences are able to anneal or hybridize with the intended DNA target under annealing conditions used for PCR. The primers can be designed to be substantially complementary to any portion of the DNA template. For example, the primers can be designed to amplify the portion of a nucleic acid that is normally transcribed in cells (the open reading frame), including 5′ and 3′ UTRs. The primers can also be designed to amplify a portion of a nucleic acid that encodes a particular domain of interest. In one embodiment, the primers are designed to amplify the coding region of a human cDNA, including all or portions of the 5′ and 3′ UTRs. Primers useful for PCR can be generated by synthetic methods that are well known in the art. “Forward primers” are primers that contain a region of nucleotides that are substantially complementary to nucleotides on the DNA template that are upstream of the DNA sequence that is to be amplified. “Upstream” is used herein to refer to a location 5, to the DNA sequence to be amplified relative to the coding strand. “Reverse primers” are primers that contain a region of nucleotides that are substantially complementary to a double-stranded DNA template that are downstream of the DNA sequence that is to be amplified. “Downstream” is used herein to refer to a location 3′ to the DNA sequence to be amplified relative to the coding strand.

[0685] Any DNA polymerase useful for PCR can be used in the methods disclosed herein. The reagents and polymerase are commercially available from a number of sources.

[0686] Chemical structures with the ability to promote stability and/or translation efficiency may also be used. The RNA preferably has 5′ and 3′ UTRs. In one embodiment, the 5′ UTR is between one and 3000 nucleotides in length. The length of 5′ and 3′ UTR sequences to be added to the coding region can be altered by different methods, including, but not limited to, designing primers for PCR that anneal to different regions of the UTRs. Using this approach, one of ordinary skill in the art can modify the 5′ and 3′ UTR lengths required to achieve optimal translation efficiency following transfection of the transcribed RNA.

[0687] The 5′ and 3′ UTRs can be the naturally occurring, endogenous 5′ and 3′ UTRs for the nucleic acid of interest. Alternatively, UTR sequences that are not endogenous to the nucleic acid of interest can be added by incorporating the UTR sequences into the forward and reverse primers or by any other modifications of the template. The use of UTR sequences that are not endogenous to the nucleic acid of interest can be useful for modifying the stability and/or translation efficiency of the RNA. For example, it is known that AU-rich elements in 3′ UTR sequences can decrease the stability of mRNA. Therefore, 3′ UTRs can be selected or designed to increase the stability of the transcribed RNA based on properties of UTRs that are well known in the art.

[0688] In one embodiment, the 5′ UTR can contain the Kozak sequence of the endogenous nucleic acid. Alternatively, when a 5′ UTR that is not endogenous to the nucleic acid of interest is being added by PCR as described above, a consensus Kozak sequence can be redesigned by adding the 5′ UTR sequence. Kozak sequences can increase the efficiency of translation of some RNA transcripts, but does not appear to be required for all RNAs to enable efficient translation. The requirement for Kozak sequences for many mRNAs is known in the art. In other embodiments the 5′ UTR can be 5′UTR of an RNA virus whose RNA genome is stable in cells. In other embodiments various nucleotide analogues can be used in the 3′ or 5′ UTR to impede exonuclease degradation of the mRNA.

[0689] To enable synthesis of RNA from a DNA template without the need for gene cloning, a promoter of transcription should be attached to the DNA template upstream of the sequence to be transcribed. When a sequence that functions as a promoter for an RNA polymerase is added to the 5′ end of the forward primer, the RNA polymerase promoter becomes incorporated into the PCR product upstream of the open reading frame that is to be transcribed. In one preferred embodiment, the promoter is a T7 polymerase promoter, as described elsewhere herein. Other useful promoters include, but are not limited to, T3 and SP6 RNA polymerase promoters. Consensus nucleotide sequences for T7, T3 and SP6 promoters are known in the art.

[0690] In a preferred embodiment, the mRNA has both a cap on the 5′ end and a 3′ poly(A) tail which determine ribosome binding, initiation of translation and stability mRNA in the cell. On a circular DNA template, for instance, plasmid DNA, RNA polymerase produces a long concatameric product which is not suitable for expression in eukaryotic cells. The transcription of plasmid DNA linearized at the end of the 3′ UTR results in normal sized mRNA which is not effective in eukaryotic transfection even if it is polyadenylated after transcription.

[0691] On a linear DNA template, phage T7 RNA polymerase can extend the 3′ end of the transcript beyond the last base of the template (Schenborn and Mierendorf, Nuc Acids Res., 13:6223-36 (1985); Nacheva and Berzal-Herranz, Eur. J. Biochem., 270:1485-65 (2003).

[0692] The conventional method of integration of polyA/T stretches into a DNA template is molecular cloning. However polyA/T sequence integrated into plasmid DNA can cause plasmid instability, which is why plasmid DNA templates obtained from bacterial cells are often highly contaminated with deletions and other aberrations. This makes cloning procedures not only laborious and time consuming but often not reliable. That is why a method which allows construction of DNA templates with polyA/T 3′ stretch without cloning highly desirable.

[0693] The polyA/T segment of the transcriptional DNA template can be produced during PCR by using a reverse primer containing a polyT tail, such as 100T tail (SEQ ID NO: 968) (size can be 50-5000 T (SEQ ID NO: 974)), or after PCR by any other method, including, but not limited to, DNA ligation or in vitro recombination. Poly(A) tails also provide stability to RNAs and reduce their degradation. Generally, the length of a poly(A) tail positively correlates with the stability of the transcribed RNA. In one embodiment, the poly(A) tail is between 100 and 5000 adenosines (SEQ ID NO: 82).

[0694] Poly(A) tails of RNAs can be further extended following in vitro transcription with the use of a poly(A) polymerase, such as E. coli polyA polymerase (E-PAP). In one embodiment, increasing the length of a poly(A) tail from 100 nucleotides to between 300 and 400 nucleotides (SEQ ID NO: 969) results in about a two-fold increase in the translation efficiency of the RNA. Additionally, the attachment of different chemical groups to the 3′ end can increase mRNA stability. Such attachment can contain modified/artificial nucleotides, aptamers and other compounds. For example, ATP analogs can be incorporated into the poly(A) tail using poly(A) polymerase. ATP analogs can further increase the stability of the RNA.

[0695] 5′ caps on also provide stability to RNA molecules. In a preferred embodiment, RNAs produced by the methods disclosed herein include a 5′ cap. The 5′ cap is provided using techniques known in the art and described herein (Cougot, et al., Trends in Biochem. Sci., 29:436-444 (2001); Stepinski, et al., RNA, 7:1468-95 (2001); Elango, et al., Biochim. Biophys. Res. Commun., 330:958-966 (2005)).

[0696] The RNAs produced by the methods disclosed herein can also contain an internal ribosome entry site (IRES) sequence. The IRES sequence may be any viral, chromosomal or artificially designed sequence which initiates cap-independent ribosome binding to mRNA and facilitates the initiation of translation. Any solutes suitable for cell electroporation, which can contain factors facilitating cellular permeability and viability such as sugars, peptides, lipids, proteins, antioxidants, and surfactants can be included.

[0697] RNA can be introduced into target cells using any of a number of different methods, for instance, commercially available methods which include, but are not limited to, electroporation (Amaxa Nucleofector-II (Amaxa Biosystems, Cologne, Germany)), (ECM 830 (BTX) (Harvard Instruments, Boston, Mass.) or the Gene Pulser II (BioRad, Denver, Colo.), Multiporator (Eppendort, Hamburg Germany), cationic liposome mediated transfection using lipofection, polymer encapsulation, peptide mediated transfection, or biolistic particle delivery systems such as “gene guns” (see, for example, Nishikawa, et al. Hum Gene Ther., 12(8):861-70 (2001).

[0698] Non-Viral Delivery Methods

[0699] In some aspects, non-viral methods can be used to deliver a nucleic acid encoding a chimeric molecule or fusion protein described herein into a cell or tissue or a subject.

[0700] In some embodiments, the non-viral method includes the use of a transposon (also called a transposable element). In some embodiments, a transposon is a piece of DNA that can insert itself at a location in a genome, for example, a piece of DNA that is capable of self-replicating and inserting its copy into a genome, or a piece of DNA that can be spliced out of a longer nucleic acid and inserted into another place in a genome. For example, a transposon comprises a DNA sequence made up of inverted repeats flanking genes for transposition.

[0701] In some embodiments, cells, e.g., T or NK cells, are generated that express a chimeric molecule or fusion protein, e.g., as described herein, by using a combination of gene insertion using the SBTS and genetic editing using a nuclease (e.g., Zinc finger nucleases (ZFNs), Transcription Activator-Like Effector Nucleases (TALENs), the CRISPR/Cas system, or engineered meganuclease re-engineered homing endonucleases).

[0702] In some embodiments, use of a non-viral method of delivery permits reprogramming of cells, e.g., T or NK cells, and direct infusion of the cells into a subject. Advantages of non-viral vectors include but are not limited to the ease and relatively low cost of producing sufficient amounts required to meet a patient population, stability during storage, and lack of immunogenicity.

[0703] Host Cells

[0704] Also provided herein are cells, e.g., immune effector cells (e.g., a population of cells, e.g., a population of immune effector cells) comprising a nucleic acid molecule, a fusion protein molecule, or a vector, e.g., as described herein. In some embodiments, the provided cells comprise a fusion protein, e.g., as described herein, comprising a domain that includes a CAR, a nucleic acid molecule encoding a fusion protein comprising a domain that includes a CAR, or a vector comprising the same.

[0705] In certain aspects, immune effector cells, e.g., T cells or NK cells, can be obtained from a unit of blood collected from a subject using any number of techniques known to the skilled artisan, such as Ficoll™ separation. In one preferred aspect, cells from the circulating blood of an individual are obtained by apheresis. The apheresis product typically contains lymphocytes, including T cells, monocytes, granulocytes, B cells, other nucleated white blood cells, red blood cells, and platelets. In one aspect, the cells collected by apheresis may be washed to remove the plasma fraction and, optionally, to place the cells in an appropriate buffer or media for subsequent processing steps. In one embodiment, the cells are washed with phosphate buffered saline (PBS). In an alternative embodiment, the wash solution lacks calcium and may lack magnesium or may lack many if not all divalent cations.

[0706] Initial activation steps in the absence of calcium can lead to magnified activation. As those of ordinary skill in the art would readily appreciate a washing step may be accomplished by methods known to those in the art, such as by using a semi-automated “flow-through” centrifuge (for example, the Cobe 2991 cell processor, the Baxter CytoMate, or the Haemonetics Cell Saver 5) according to the manufacturer's instructions. After washing, the cells may be resuspended in a variety of biocompatible buffers, such as, for example, Ca-free, Mg-free PBS, PlasmaLyte A, or other saline solution with or without buffer. Alternatively, the undesirable components of the apheresis sample may be removed and the cells directly resuspended in culture media.

[0707] It is recognized that the methods of the application can utilize culture media conditions comprising 5% or less, for example 2%, human AB serum, and employ known culture media conditions and compositions, for example those described in Smith et al., “Ex vivo expansion of human T cells for adoptive immunotherapy using the novel Xeno-free CTS Immune Cell Serum Replacement” Clinical & Translational Immunology (2015) 4, e31; doi:10.1038/cti.2014.31.

[0708] In one aspect, T cells are isolated from peripheral blood lymphocytes by lysing the red blood cells and depleting the monocytes, for example, by centrifugation through a PERCOLL™ gradient or by counterflow centrifugal elutriation.

[0709] The methods described herein can include, e.g., selection of a specific subpopulation of immune effector cells, e.g., T cells, that are a T regulatory cell-depleted population, CD25+ depleted cells, using, e.g., a negative selection technique, e.g., described herein. Preferably, the population of T regulatory depleted cells contains less than 30%, 25%, 20%, 15%, 10%, 5%, 4%, 3%, 2%, 1% of CD25+ cells.

[0710] In one embodiment, T regulatory cells, e.g., CD25+ T cells, are removed from the population using an anti-CD25 antibody, or fragment thereof, or a CD25-binding ligand, IL-2. In one embodiment, the anti-CD25 antibody, or fragment thereof, or CD25-binding ligand is conjugated to a substrate, e.g., a bead, or is otherwise coated on a substrate, e.g., a bead. In one embodiment, the anti-CD25 antibody, or fragment thereof, is conjugated to a substrate as described herein.

[0711] In one embodiment, the T regulatory cells, e.g., CD25+ T cells, are removed from the population using CD25 depletion reagent from Miltenyi™. In one embodiment, the ratio of cells to CD25 depletion reagent is 1e7 cells to 20 uL, or 1e7 cells to15 uL, or 1e7 cells to 10 uL, or 1e7 cells to 5 uL, or 1e7 cells to 2.5 uL, or 1e7 cells to 1.25 uL. In one embodiment, e.g., for T regulatory cells, e.g., CD25+ depletion, greater than 500 million cells/ml is used. In a further aspect, a concentration of cells of 600, 700, 800, or 900 million cells/ml is used.

[0712] In one embodiment, the population of immune effector cells to be depleted includes about 6×10⁹ CD25+ T cells. In other aspects, the population of immune effector cells to be depleted include about 1×10⁹ to 1×10¹⁰ CD25+ T cell, and any integer value in between. In one embodiment, the resulting population T regulatory depleted cells has 2×10⁹T regulatory cells, e.g., CD25+ cells, or less (e.g., 1×10⁹, 5×10⁸, 1×10⁸, 5×10⁷, 1×10⁷, or less CD25+ cells).

[0713] In one embodiment, the T regulatory cells, e.g., CD25+ cells, are removed from the population using the CliniMAC system with a depletion tubing set, such as, e.g., tubing 162-01. In one embodiment, the CliniMAC system is run on a depletion setting such as, e.g., DEPLETION2.1.

[0714] Without wishing to be bound by a particular theory, decreasing the level of negative regulators of immune cells (e.g., decreasing the number of unwanted immune cells, e.g., T_{REG} cells), in a subject prior to apheresis or during manufacturing of a fusion protein, e.g., as described herein, comprising a domain that includes a CAR-expressing cell product can reduce the risk of subject relapse. For example, methods of depleting T_{REG} cells are known in the art. Methods of decreasing T_{REG} cells include, but are not limited to, cyclophosphamide, anti-GITR antibody (an anti-GITR antibody described herein), CD25-depletion, and combinations thereof.

[0715] In some embodiments, the manufacturing methods comprise reducing the number of (e.g., depleting) T_{REG} cells prior to manufacturing of the fusion protein, e.g., as described herein, comprising a domain that includes a CAR-expressing cell. For example, manufacturing methods comprise contacting the sample, e.g., the apheresis sample, with an anti-GITR antibody and/or an anti-CD25 antibody (or fragment thereof, or a CD25-binding ligand), e.g., to deplete T_{REG} cells prior to manufacturing of the CAR-expressing cell (e.g., T cell, NK cell) product.

[0716] In an embodiment, a subject is pre-treated with one or more therapies that reduce T_{REG} cells prior to collection of cells for fusion protein, e.g., as described herein, comprising a domain that includes a CAR-expressing cell product manufacturing, thereby reducing the risk of subject relapse to fusion protein, e.g., as described herein, comprising a domain that includes a CAR-expressing cell treatment. In an embodiment, methods of decreasing T_{REG} cells include, but are not limited to, administration to the subject of one or more of cyclophosphamide, anti-GITR antibody, CD25-depletion, or a combination thereof. Administration of one or more of cyclophosphamide, anti-GITR antibody, CD25-depletion, or a combination thereof, can occur before, during or after an infusion of the CAR-expressing cell product.

[0717] In an embodiment, a subject is pre-treated with cyclophosphamide prior to collection of cells for CAR-expressing cell product manufacturing, thereby reducing the risk of subject relapse to fusion protein, e.g., as described herein, comprising a domain that includes a CAR-expressing cell treatment. In an embodiment, a subject is pre-treated with an anti-GITR antibody prior to collection of cells for CAR-expressing cell product manufacturing, thereby reducing the risk of subject relapse to CAR-expressing cell treatment.

[0718] In one embodiment, the population of cells to be removed are neither the regulatory T cells or tumor cells, but cells that otherwise negatively affect the expansion and/or function of CART cells, e.g. cells expressing CD14, CD11 b, CD33, CD15, or other markers expressed by potentially immune suppressive cells. In one embodiment, such cells are envisioned to be removed concurrently with regulatory T cells and/or tumor cells, or following said depletion, or in another order.

[0719] The methods described herein can include more than one selection step, e.g., more than one depletion step. Enrichment of a T cell population by negative selection can be accomplished, e.g., with a combination of antibodies directed to surface markers unique to the negatively selected cells. One method is cell sorting and/or selection via negative magnetic immunoadherence or flow cytometry that uses a cocktail of monoclonal antibodies directed to cell surface markers present on the cells negatively selected. For example, to enrich for CD4+ cells by negative selection, a monoclonal antibody cocktail can include antibodies to CD14, CD20, CD11 b, CD16, HLA-DR, and CD8.

[0720] The methods described herein can further include removing cells from the population which express a tumor antigen, e.g., a tumor antigen that does not comprise CD25, e.g., CD19, CD30, CD38, CD123, CD20, CD14 or CD11 b, to thereby provide a population of T regulatory depleted, e.g., CD25+ depleted, and tumor antigen depleted cells that are suitable for expression of a fusion protein, e.g., as described herein, comprising a domain that includes a CAR, e.g., a CAR described herein. In one embodiment, tumor antigen expressing cells are removed simultaneously with the T regulatory, e.g., CD25+ cells. For example, an anti-CD25 antibody, or fragment thereof, and an anti-tumor antigen antibody, or fragment thereof, can be attached to the same substrate, e.g., bead, which can be used to remove the cells or an anti-CD25 antibody, or fragment thereof, or the anti-tumor antigen antibody, or fragment thereof, can be attached to separate beads, a mixture of which can be used to remove the cells. In other embodiments, the removal of T regulatory cells, e.g., CD25+ cells, and the removal of the tumor antigen expressing cells is sequential, and can occur, e.g., in either order.

[0721] Also provided are methods that include removing cells from the population which express a check point inhibitor, e.g., a check point inhibitor described herein, e.g., one or more of PD1+ cells, LAG3+ cells, and TIM3+ cells, to thereby provide a population of T regulatory depleted, e.g., CD25+ depleted cells, and check point inhibitor depleted cells, e.g., PD1+, LAG3+ and/or TIM3+ depleted cells. Exemplary check point inhibitors include B7-H1, B7-1, CD160, P1H, 2B4, PD1, TIM3, CEACAM (e.g., CEACAM-1, CEACAM-3 and/or CEACAM-5), LAGS, TIGIT, CTLA-4, BTLA and LAIR1. In one embodiment, check point inhibitor expressing cells are removed simultaneously with the T regulatory, e.g., CD25+ cells. For example, an anti-CD25 antibody, or fragment thereof, and an anti-check point inhibitor antibody, or fragment thereof, can be attached to the same bead which can be used to remove the cells, or an anti-CD25 antibody, or fragment thereof, and the anti-check point inhibitor antibody, or fragment there, can be attached to separate beads, a mixture of which can be used to remove the cells. In other embodiments, the removal of T regulatory cells, e.g., CD25+ cells, and the removal of the check point inhibitor expressing cells is sequential, and can occur, e.g., in either order.

[0722] Methods described herein can include a positive selection step. For example, T cells can isolated by incubation with anti-CD3/anti-CD28 (e.g., 3×28)-conjugated beads, such as DYNABEADS® M-450 CD3/CD28 T, for a time period sufficient for positive selection of the desired T cells. In one embodiment, the time period is about 30 minutes. In a further embodiment, the time period ranges from 30 minutes to 36 hours or longer and all integer values there between. In a further embodiment, the time period is at least 1, 2, 3, 4, 5, or 6 hours. In yet another embodiment, the time period is 10 to 24 hours, e.g., 24 hours. Longer incubation times may be used to isolate T cells in any situation where there are few T cells as compared to other cell types, such in isolating tumor infiltrating lymphocytes (TIL) from tumor tissue or from immunocompromised individuals. Further, use of longer incubation times can increase the efficiency of capture of CD8+ T cells. Thus, by simply shortening or lengthening the time T cells are allowed to bind to the CD3/CD28 beads and/or by increasing or decreasing the ratio of beads to T cells (as described further herein), subpopulations of T cells can be preferentially selected for or against at culture initiation or at other time points during the process. Additionally, by increasing or decreasing the ratio of anti-CD3 and/or anti-CD28 antibodies on the beads or other surface, subpopulations of T cells can be preferentially selected for or against at culture initiation or at other desired time points.

[0723] In one embodiment, a T cell population can be selected that expresses one or more of IFN-γ, TNFα, IL-17A, IL-2, IL-3, IL-4, GM-CSF, IL-10, IL-13, granzyme B, and perforin, or other appropriate molecules, e.g., other cytokines. Methods for screening for cell expression can be determined, e.g., by the methods described in PCT Publication No.: WO 2013/126712.

[0724] For isolation of a desired population of cells by positive or negative selection, the concentration of cells and surface (e.g., particles such as beads) can be varied. In certain aspects, it may be desirable to significantly decrease the volume in which beads and cells are mixed together (e.g., increase the concentration of cells), to ensure maximum contact of cells and beads. For example, in one aspect, a concentration of 10 billion cells/ml, 9 billion/ml, 8 billion/ml, 7 billion/ml, 6 billion/ml, or 5 billion/ml is used. In one aspect, a concentration of 1 billion cells/ml is used. In yet one aspect, a concentration of cells from 75, 80, 85, 90, 95, or 100 million cells/ml is used. In further aspects, concentrations of 125 or 150 million cells/ml can be used.

[0725] Using high concentrations can result in increased cell yield, cell activation, and cell expansion. Further, use of high cell concentrations allows more efficient capture of cells that may weakly express target antigens of interest, such as CD28-negative T cells, or from samples where there are many tumor cells present (e.g., leukemic blood, tumor tissue, etc.). Such populations of cells may have therapeutic value and would be desirable to obtain. For example, using high concentration of cells allows more efficient selection of CD8+ T cells that normally have weaker CD28 expression.

[0726] In a related aspect, it may be desirable to use lower concentrations of cells. By significantly diluting the mixture of T cells and surface (e.g., particles such as beads), interactions between the particles and cells is minimized. This selects for cells that express high amounts of desired antigens to be bound to the particles. For example, CD4+ T cells express higher levels of CD28 and are more efficiently captured than CD8+ T cells in dilute concentrations. In one aspect, the concentration of cells used is 5×10⁶/ml. In other aspects, the concentration used can be from about 1×10⁵/ml to 1×10⁶/ml, and any integer value in between.

[0727] In other aspects, the cells may be incubated on a rotator for varying lengths of time at varying speeds at either 2-10° C. or at room temperature.

[0728] T cells for stimulation can also be frozen after a washing step. Wishing not to be bound by theory, the freeze and subsequent thaw step provides a more uniform product by removing granulocytes and to some extent monocytes in the cell population. After the washing step that removes plasma and platelets, the cells may be suspended in a freezing solution. While many freezing solutions and parameters are known in the art and will be useful in this context, one method involves using PBS containing 20% DMSO and 8% human serum albumin, or culture media containing 10% Dextran 40 and 5% Dextrose, 20% Human Serum Albumin and 7.5% DMSO, or 31.25% Plasmalyte-A, 31.25% Dextrose 5%, 0.45% NaCl, 10% Dextran 40 and 5% Dextrose, 20% Human Serum Albumin, and 7.5% DMSO or other suitable cell freezing media containing for example, Hespan and PlasmaLyte A, the cells then are frozen to −80° C. at a rate of 1° per minute and stored in the vapor phase of a liquid nitrogen storage tank. Other methods of controlled freezing may be used as well as uncontrolled freezing immediately at −20° C. or in liquid nitrogen.

[0729] In certain aspects, cryopreserved cells are thawed and washed as described herein and allowed to rest for one hour at room temperature prior to activation using the methods of the present invention.

[0730] Also contemplated in the context of the invention is the collection of blood samples or apheresis product from a subject at a time period prior to when the expanded cells as described herein might be needed. As such, the source of the cells to be expanded can be collected at any time point necessary, and desired cells, such as T cells, isolated and frozen for later use in immune effector cell therapy for any number of diseases or conditions that would benefit from immune effector cell therapy, such as those described herein. In one aspect a blood sample or an apheresis is taken from a generally healthy subject. In certain aspects, a blood sample or an apheresis is taken from a generally healthy subject who is at risk of developing a disease, but who has not yet developed a disease, and the cells of interest are isolated and frozen for later use. In certain aspects, the T cells may be expanded, frozen, and used at a later time. In certain aspects, samples are collected from a patient shortly after diagnosis of a particular disease as described herein but prior to any treatments. In a further aspect, the cells are isolated from a blood sample or an apheresis from a subject prior to any number of relevant treatment modalities, including but not limited to treatment with agents such as natalizumab, efalizumab, antiviral agents, chemotherapy, radiation, immunosuppressive agents, such as cyclosporin, azathioprine, methotrexate, mycophenolate, and FK506, antibodies, or other immunoablative agents such as CAMPATH, anti-CD3 antibodies, cytoxan, fludarabine, cyclosporin, FK506, rapamycin, mycophenolic acid, steroids, FR901228, and irradiation.

[0731] In a further aspect of the present invention, T cells are obtained from a patient directly following treatment that leaves the subject with functional T cells. In this regard, it has been observed that following certain cancer treatments, in particular treatments with drugs that damage the immune system, shortly after treatment during the period when patients would normally be recovering from the treatment, the quality of T cells obtained may be optimal or improved for their ability to expand ex vivo. Likewise, following ex vivo manipulation using the methods described herein, these cells may be in a preferred state for enhanced engraftment and in vivo expansion. Thus, it is contemplated within the context of the present disclosure to collect blood cells, including T cells, dendritic cells, or other cells of the hematopoietic lineage, during this recovery phase. Further, in certain aspects, mobilization (for example, mobilization with GM-CSF) and conditioning regimens can be used to create a condition in a subject wherein repopulation, recirculation, regeneration, and/or expansion of particular cell types is favored, especially during a defined window of time following therapy. Illustrative cell types include T cells, B cells, dendritic cells, and other cells of the immune system.

[0732] In one embodiment, the immune effector cells expressing a fusion protein, e.g., as described herein, comprising a domain that includes a CAR molecule, e.g., a CAR molecule described herein, are obtained from a subject that has received a low, immune enhancing dose of an mTOR inhibitor. In an embodiment, the population of immune effector cells, e.g., T cells, to be engineered to express a CAR, are harvested after a sufficient time, or after sufficient dosing of the low, immune enhancing, dose of an mTOR inhibitor, such that the level of PD1 negative immune effector cells, e.g., T cells, or the ratio of PD1 negative immune effector cells, e.g., T cells/PD1 positive immune effector cells, e.g., T cells, in the subject or harvested from the subject has been, at least transiently, increased.

[0733] In other embodiments, population of immune effector cells, e.g., T cells, which have, or will be engineered to express a fusion protein, e.g., as described herein, comprising a domain that includes a CAR, can be treated ex vivo by contact with an amount of an mTOR inhibitor that increases the number of PD1 negative immune effector cells, e.g., T cells or increases the ratio of PD1 negative immune effector cells, e.g., T cells/PD1 positive immune effector cells, e.g., T cells.

[0734] In one embodiment, a T cell population is diaglycerol kinase (DGK)-deficient. DGK-deficient cells include cells that do not express DGK RNA or protein, or have reduced or inhibited DGK activity. DGK-deficient cells can be generated by genetic approaches, e.g., administering RNA-interfering agents, e.g., siRNA, shRNA, miRNA, to reduce or prevent DGK expression. Alternatively, DGK-deficient cells can be generated by treatment with DGK inhibitors described herein.

[0735] In one embodiment, a T cell population is Ikaros-deficient. Ikaros-deficient cells include cells that do not express Ikaros RNA or protein, or have reduced or inhibited Ikaros activity, Ikaros-deficient cells can be generated by genetic approaches, e.g., administering RNA-interfering agents, e.g., siRNA, shRNA, miRNA, to reduce or prevent Ikaros expression. Alternatively, Ikaros-deficient cells can be generated by treatment with Ikaros inhibitors, e.g., lenalidomide.

[0736] In embodiments, a T cell population is DGK-deficient and Ikaros-deficient, e.g., does not express DGK and Ikaros, or has reduced or inhibited DGK and Ikaros activity. Such DGK and Ikaros-deficient cells can be generated by any of the methods described herein.

[0737] In an embodiment, the NK cells are obtained from the subject. In another embodiment, the NK cells are an NK cell line, e.g., NK-92 cell line (Conkwest).

[0738] Additional Expressed Agents

[0739] In another embodiment, a fusion protein, e.g., as described herein, comprising a domain that includes a CAR-expressing immune effector cell described herein can further express another agent, e.g., an agent which enhances the activity of a CAR-expressing cell. For example, in one embodiment, the agent can be an agent which inhibits an inhibitory molecule. Examples of inhibitory molecules include PD-1, PD-L1, CTLA-4, TIM-3, CEACAM (e.g., CEACAM-1, CEACAM-3 and/or CEACAM-5), LAG-3, VISTA, BTLA, TIGIT, LAIR1, CD160, 2B4 and TGFR beta, e.g., as described herein. In one embodiment, the agent that inhibits an inhibitory molecule comprises a first polypeptide, e.g., an inhibitory molecule, associated with a second polypeptide that provides a positive signal to the cell, e.g., an intracellular signaling domain described herein. In one embodiment, the agent comprises a first polypeptide, e.g., of an inhibitory molecule such as PD-1, PD-L1, CTLA-4, TIM-3, CEACAM (e.g., CEACAM-1, CEACAM-3 and/or CEACAM-5), LAG-3, VISTA, BTLA, TIGIT, LAIR1, CD160, 2B4 or TGFR beta, or a fragment of any of these, and a second polypeptide which is an intracellular signaling domain described herein (e.g., comprising a costimulatory domain (e.g., 41BB, CD27 or CD28, e.g., as described herein) and/or a primary signaling domain (e.g., a CD3 zeta signaling domain described herein). In one embodiment, the agent comprises a first polypeptide of PD-1 or a fragment thereof, and a second polypeptide of an intracellular signaling domain described herein (e.g., a CD28, CD27, OX40 or 4-IBB signaling domain described herein and/or a CD3 zeta signaling domain described herein).

[0740] In one embodiment, the fusion protein, e.g., as described herein, comprising a domain that includes a CAR-expressing immune effector cell described herein can further comprise a second fusion protein, e.g., as described herein, comprising a domain that includes a CAR, e.g., a second CAR that includes a different antigen binding domain, e.g., to the same target (e.g., a target described above) or a different target. In one embodiment, the second CAR includes an antigen binding domain to a target expressed on the same cancer cell type as the target of the first CAR. In one embodiment, the CAR-expressing immune effector cell comprises a first CAR that targets a first antigen and includes an intracellular signaling domain having a costimulatory signaling domain but not a primary signaling domain, and a second CAR that targets a second, different, antigen and includes an intracellular signaling domain having a primary signaling domain but not a costimulatory signaling domain.

[0741] While not wishing to be bound by theory, placement of a costimulatory signaling domain, e.g., 4-1BB, CD28, CD27 or OX-40, onto the first CAR, and the primary signaling domain, e.g., CD3 zeta, on the second CAR can limit the CAR activity to cells where both targets are expressed. In one embodiment, the CAR expressing immune effector cell comprises a first CAR that includes an antigen binding domain that targets, e.g., a target described above, a transmembrane domain and a costimulatory domain and a second CAR that targets an antigen other than antigen targeted by the first CAR (e.g., an antigen expressed on the same cancer cell type as the first target) and includes an antigen binding domain, a transmembrane domain and a primary signaling domain. In another embodiment, the CAR expressing immune effector cell comprises a first CAR that includes an antigen binding domain that targets, e.g., a target described above, a transmembrane domain and a primary signaling domain and a second CAR that targets an antigen other than antigen targeted by the first CAR (e.g., an antigen expressed on the same cancer cell type as the first target) and includes an antigen binding domain to the antigen, a transmembrane domain and a costimulatory signaling domain.

[0742] In one embodiment, the CAR-expressing immune effector cell comprises a CAR described herein, e.g., a CAR to a target described above, and an inhibitory CAR. In one embodiment, the inhibitory CAR comprises an antigen binding domain that binds an antigen found on normal cells but not cancer cells, e.g., normal cells that also express the target. In one embodiment, the inhibitory CAR comprises the antigen binding domain, a transmembrane domain and an intracellular domain of an inhibitory molecule. For example, the intracellular domain of the inhibitory CAR can be an intracellular domain of PD1, PD-L1, CTLA-4, TIM-3, CEACAM (e.g., CEACAM-1, CEACAM-3 and/or CEACAM-5), LAG-3, VISTA, BTLA, TIGIT, LAIR1, CD160, 2B4 or TGFR beta.

[0743] In one embodiment, an immune effector cell (e.g., T cell, NK cell) comprises a first CAR comprising an antigen binding domain that binds to a tumor antigen as described herein, and a second CAR comprising a PD1 extracellular domain or a fragment thereof.

[0744] In one embodiment, the cell further comprises an inhibitory molecule as described above.

[0745] In one embodiment, the second CAR in the cell is an inhibitory CAR, wherein the inhibitory CAR comprises an antigen binding domain, a transmembrane domain, and an intracellular domain of an inhibitory molecule. The inhibitory molecule can be chosen from one or more of: PD1, PD-L1, CTLA-4, TIM-3, LAG-3, VISTA, BTLA, TIGIT, LAIR1, CD160, 2B4, TGFR beta, CEACAM-1, CEACAM-3, and CEACAM-5. In one embodiment, the second CAR molecule comprises the extracellular domain of PD1 or a fragment thereof.

[0746] In embodiments, the second CAR molecule in the cell further comprises an intracellular signaling domain comprising a primary signaling domain and/or an intracellular signaling domain.

[0747] In other embodiments, the intracellular signaling domain in the cell comprises a primary signaling domain comprising the functional domain of CD3 zeta and a costimulatory signaling domain comprising the functional domain of 4-1BB.

[0748] In one embodiment, the second CAR molecule in the cell comprises the amino acid sequence of SEQ ID NO: 26.

[0749] In certain embodiments, the antigen binding domain of the first CAR molecule comprises a scFv and the antigen binding domain of the second CAR molecule does not comprise a scFv. For example, the antigen binding domain of the first CAR molecule comprises a scFv and the antigen binding domain of the second CAR molecule comprises a camelid VHH domain.

[0750] Split CAR

[0751] In some embodiments, the CAR-expressing cell uses a split CAR. The split CAR approach is described in more detail in publications WO2014/055442 and WO2014/055657. Briefly, a split CAR system comprises a cell expressing a first CAR having a first antigen binding domain and a costimulatory domain (e.g., 41BB), and the cell also expresses a second CAR having a second antigen binding domain and an intracellular signaling domain (e.g., CD3 zeta). When the cell encounters the first antigen, the costimulatory domain is activated, and the cell proliferates. When the cell encounters the second antigen, the intracellular signaling domain is activated and cell-killing activity begins. Thus, the CAR-expressing cell is only fully activated in the presence of both antigens.

[0752] Multiple CAR Expression

[0753] In one aspect, the fusion protein, e.g., as described herein, comprising a domain that includes a CAR-expressing cell described herein can further comprise a second fusion protein, e.g., as described herein, comprising a domain that includes a CAR, e.g., a second CAR that includes a different antigen binding domain, e.g., to the same target or a different target (e.g., a target other than a cancer associated antigen described herein or a different cancer associated antigen described herein). In one embodiment, the second CAR includes an antigen binding domain to a target expressed the same cancer cell type as the cancer associated antigen. In one embodiment, the CAR-expressing cell comprises a first CAR that targets a first antigen and includes an intracellular signaling domain having a costimulatory signaling domain but not a primary signaling domain, and a second CAR that targets a second, different, antigen and includes an intracellular signaling domain having a primary signaling domain but not a costimulatory signaling domain. While not wishing to be bound by theory, placement of a costimulatory signaling domain, e.g., 4-1BB, CD28, CD27 or OX-40, onto the first CAR, and the primary signaling domain, e.g., CD3 zeta, on the second CAR can limit the CAR activity to cells where both targets are expressed. In one embodiment, the CAR expressing cell comprises a first cancer associated antigen CAR that includes an antigen binding domain that binds a target antigen described herein, a transmembrane domain and a costimulatory domain and a second CAR that targets a different target antigen (e.g., an antigen expressed on that same cancer cell type as the first target antigen) and includes an antigen binding domain, a transmembrane domain and a primary signaling domain. In another embodiment, the CAR expressing cell comprises a first CAR that includes an antigen binding domain that binds a target antigen described herein, a transmembrane domain and a primary signaling domain and a second CAR that targets an antigen other than the first target antigen (e.g., an antigen expressed on the same cancer cell type as the first target antigen) and includes an antigen binding domain to the antigen, a transmembrane domain and a costimulatory signaling domain.

[0754] In some embodiments, the claimed invention comprises a first and second CAR, wherein the antigen binding domain of one of said first CAR said second CAR does not comprise a variable light domain and a variable heavy domain. In some embodiments, the antigen binding domain of one of said first CAR said second CAR is an scFv, and the other is not an scFv. In some embodiments, the antigen binding domain of one of said first CAR said second CAR comprises a single VH domain, e.g., a camelid, shark, or lamprey single VH domain, or a single VH domain derived from a human or mouse sequence. In some embodiments, the antigen binding domain of one of said first CAR said second CAR comprises a nanobody. In some embodiments, the antigen binding domain of one of said first CAR said second CAR comprises a camelid VHH domain.

[0755] Allogeneic Cells

[0756] In embodiments described herein, the immune effector cell can be an allogeneic immune effector cell, e.g., T cell or NK cell. For example, the cell can be an allogeneic T cell, e.g., an allogeneic T cell lacking expression of a functional T cell receptor (TCR) and/or human leukocyte antigen (HLA), e.g., HLA class I and/or HLA class II or beta 2 microglobulin (B2M).

[0757] A T cell lacking a functional TCR can be, e.g., engineered such that it does not express any functional TCR on its surface, engineered such that it does not express one or more subunits that comprise a functional TCR, e.g., TRAC, TRBC1, TRBC2, CD3E, CD3G, or CD3D, or engineered such that it produces very little functional TCR on its surface. Alternatively, the T cell can express a substantially impaired TCR, e.g., by expression of mutated or truncated forms of one or more of the subunits of the TCR. The term “substantially impaired TCR” means that this TCR will not elicit an adverse immune reaction in a host.

[0758] A T cell described herein can be, e.g., engineered such that it does not express a functional HLA on its surface. For example, a T cell described herein, can be engineered such that cell surface expression HLA, e.g., HLA class 1 and/or HLA class II, or subunit or regulator of HLA expression, e.g., B2M, is downregulated.

[0759] A T cell described herein can be, e.g., engineered such that it does not express a functional B2M on its surface. For example, a T cell described herein, can be engineered such that cell surface expression of B2M is downregulated.

[0760] In some embodiments, the T cell can lack a functional TCR and a functional HLA, e.g., HLA class I and/or HLA class II.

[0761] Modified T cells that lack expression of a functional TCR and/or HLA can be obtained by any suitable means, including a knock out or knock down of one or more subunit of TCR or HLA. For example, the T cell can include a knock down of TCR and/or HLA using siRNA, shRNA, clustered regularly interspaced short palindromic repeats (CRISPR) transcription-activator like effector nuclease (TALEN), or zinc finger endonuclease (ZFN).

[0762] In some embodiments, the allogeneic cell can be a cell which does not express or expresses at low levels an inhibitory molecule, e.g. by any method described herein. For example, the cell can be a cell that does not express or expresses at low levels an inhibitory molecule, e.g., that can decrease the ability of a CAR-expressing cell to mount an immune effector response. Examples of inhibitory molecules include PD1, PD-L1, CTLA4, TIM3, CEACAM (e.g., CEACAM-1, CEACAM-3 and/or CEACAM-5), LAGS, VISTA, BTLA, TIGIT, LAIR1, CD160, 2B4 and TGFR beta. Inhibition of an inhibitory molecule, e.g., by inhibition at the DNA, RNA or protein level, can optimize a CAR-expressing cell performance. In embodiments, an inhibitory nucleic acid, e.g., an inhibitory nucleic acid, e.g., a dsRNA, e.g., an siRNA or shRNA, a clustered regularly interspaced short palindromic repeats (CRISPR), a transcription-activator like effector nuclease (TALEN), or a zinc finger endonuclease (ZFN), e.g., as described herein, can be used.

[0763] siRNA and shRNA

[0764] In some embodiments, TCR expression and/or HLA or B2M expression can be inhibited using siRNA or shRNA that targets a nucleic acid encoding a TCR and/or HLA in a T cell.

[0765] CRISPR

[0766] “CRISPR” or “CRISPR to TCR and/or HLA” or “CRISPR to inhibit TCR and/or HLA” as used herein refers to a set of clustered regularly interspaced short palindromic repeats, or a system comprising such a set of repeats. “Cas”, as used herein, refers to a CRISPR-associated protein. A “CRISPR/Cas” system refers to a system derived from CRISPR and Cas which can be used to silence or mutate a TCR and/or HLA or B2M gene.

[0767] Artificial CRISPR/Cas systems can be generated which inhibit TCR and/or HLA, using technology known in the art, e.g., that described in U.S. Publication No. 20140068797, and Cong (2013) Science 339: 819-823. Other artificial CRISPR/Cas systems that are known in the art may also be generated which inhibit TCR and/or HLA, e.g., that described in Tsai (2014) Nature Biotechnol., 32:6 569-576, U.S. Pat. Nos. 8,871,445; 8,865,406; 8,795,965; 8,771,945; and 8,697,359.

[0768] TALEN

[0769] “TALEN” or “TALEN to HLA and/or TCR” or “TALEN to inhibit HLA and/or TCR” refers to a transcription activator-like effector nuclease, an artificial nuclease which can be used to edit the HLA or B2M and/or TCR gene.

[0770] TALENs are produced artificially by fusing a TAL effector DNA binding domain to a DNA cleavage domain. Transcription activator-like effects (TALEs) can be engineered to bind any desired DNA sequence, including a portion of the HLA or TCR gene. By combining an engineered TALE with a DNA cleavage domain, a restriction enzyme can be produced which is specific to any desired DNA sequence, including a HLA or TCR sequence. These can then be introduced into a cell, wherein they can be used for genome editing. Boch (2011) Nature Biotech. 29: 135-6; and Boch et al. (2009) Science 326: 1509-12; Moscou et al. (2009) Science 326: 3501.

[0771] TALENs specific to sequences in HLA or TCR can be constructed using any method known in the art, including various schemes using modular components. Zhang et al. (2011) Nature Biotech. 29: 149-53; Geibler et al. (2011) PLoS ONE 6: e19509.

[0772] Zinc finger nuclease to inhibit HLA and/or TCR

[0773] “ZFN” or “Zinc Finger Nuclease” or “ZFN to HLA and/or TCR” or “ZFN to inhibit HLA and/or TCR” refer to a zinc finger nuclease, an artificial nuclease which can be used to edit the HLA and/or TCR or B2M gene.

[0774] ZFNs specific to sequences in HLA AND/OR TCR can be constructed using any method known in the art. See, e.g., Provasi (2011) Nature Med. 18: 807-815; Torikai (2013) Blood 122: 1341-1349; Cathomen et al. (2008) Mol. Ther. 16: 1200-7; Guo et al. (2010) J. Mol. Biol. 400: 96; U.S. Patent Publication 2011/0158957; and U.S. Patent Publication 2012/0060230.

[0775] Telomerase Expression

[0776] While not wishing to be bound by any particular theory, in some embodiments, a therapeutic T cell has short term persistence in a patient, due to shortened telomeres in the T cell; accordingly, transfection with a telomerase gene can lengthen the telomeres of the T cell and improve persistence of the T cell in the patient. See Carl June, “Adoptive T cell therapy for cancer in the clinic”, Journal of Clinical Investigation, 117:1466-1476 (2007). Thus, in an embodiment, an immune effector cell, e.g., a T cell, ectopically expresses a telomerase subunit, e.g., the catalytic subunit of telomerase, e.g., TERT, e.g., hTERT. In some aspects, this disclosure provides a method of producing a CAR-expressing cell, comprising contacting a cell with a nucleic acid encoding a telomerase subunit, e.g., the catalytic subunit of telomerase, e.g., TERT, e.g., hTERT. The cell may be contacted with the nucleic acid before, simultaneous with, or after being contacted with a construct encoding a CAR.

[0777] Expansion and Activation

[0778] Immune effector cells such as T cells may be activated and expanded generally using methods as described, for example, in U.S. Pat. Nos. 6,352,694; 6,534,055; 6,905,680; 6,692,964; 5,858,358; 6,887,466; 6,905,681; 7,144,575; 7,067,318; 7,172,869; 7,232,566; 7,175,843; 5,883,223; 6,905,874; 6,797,514; 6,867,041; and U.S. Patent Application Publication No. 20060121005, each of which is incorporated by reference in its entirety.

[0779] Generally, a population of immune effector cells e.g., T regulatory cell depleted cells, may be expanded by contact with a surface having attached thereto an agent that stimulates a CD3/TCR complex associated signal and a ligand that stimulates a costimulatory molecule on the surface of the T cells. In particular, T cell populations may be stimulated as described herein, such as by contact with an anti-CD3 antibody, or antigen-binding fragment thereof, or an anti-CD2 antibody immobilized on a surface, or by contact with a protein kinase C activator (e.g., bryostatin) in conjunction with a calcium ionophore. For co-stimulation of an accessory molecule on the surface of the T cells, a ligand that binds the accessory molecule is used. For example, a population of T cells can be contacted with an anti-CD3 antibody and an anti-CD28 antibody, under conditions appropriate for stimulating proliferation of the T cells. To stimulate proliferation of either CD4+ T cells or CD8+ T cells, an anti-CD3 antibody and an anti-CD28 antibody can be used. Examples of an anti-CD28 antibody include 9.3, B-T3, XR-CD28 (Diaclone, Besancon, France) can be used as can other methods commonly known in the art (Berg et al., Transplant Proc. 30(8):3975-3977, 1998; Haanen et al., J. Exp. Med. 190(9):13191328, 1999; Garland et al., J. Immunol Meth. 227(1-2):53-63, 1999).

[0780] In certain aspects, the primary stimulatory signal and the costimulatory signal for the T cell may be provided by different protocols. For example, the agents providing each signal may be in solution or coupled to a surface. When coupled to a surface, the agents may be coupled to the same surface (i.e., in “cis” formation) or to separate surfaces (i.e., in “trans” formation). Alternatively, one agent may be coupled to a surface and the other agent in solution. In one aspect, the agent providing the costimulatory signal is bound to a cell surface and the agent providing the primary activation signal is in solution or coupled to a surface. In certain aspects, both agents can be in solution. In one aspect, the agents may be in soluble form, and then cross-linked to a surface, such as a cell expressing Fc receptors or an antibody or other binding agent which will bind to the agents. In this regard, see for example, U.S. Patent Application Publication Nos. 20040101519 and 20060034810 for artificial antigen presenting cells (aAPCs) that are contemplated for use in activating and expanding T cells in the present invention.

[0781] In one aspect, the two agents are immobilized on beads, either on the same bead, i.e., “cis,” or to separate beads, i.e., “trans.” By way of example, the agent providing the primary activation signal is an anti-CD3 antibody or an antigen-binding fragment thereof and the agent providing the costimulatory signal is an anti-CD28 antibody or antigen-binding fragment thereof; and both agents are co-immobilized to the same bead in equivalent molecular amounts. In one aspect, a 1:1 ratio of each antibody bound to the beads for CD4+ T cell expansion and T cell growth is used. In certain aspects of the present invention, a ratio of anti CD3:CD28 antibodies bound to the beads is used such that an increase in T cell expansion is observed as compared to the expansion observed using a ratio of 1:1. In one particular aspect an increase of from about 1 to about 3 fold is observed as compared to the expansion observed using a ratio of 1:1. In one aspect, the ratio of CD3:CD28 antibody bound to the beads ranges from 100:1 to 1:100 and all integer values there between. In one aspect, more anti-CD28 antibody is bound to the particles than anti-CD3 antibody, i.e., the ratio of CD3:CD28 is less than one. In certain aspects, the ratio of anti CD28 antibody to anti CD3 antibody bound to the beads is greater than 2:1. In one particular aspect, a 1:100 CD3:CD28 ratio of antibody bound to beads is used. In one aspect, a 1:75 CD3:CD28 ratio of antibody bound to beads is used. In a further aspect, a 1:50 CD3:CD28 ratio of antibody bound to beads is used. In one aspect, a 1:30 CD3:CD28 ratio of antibody bound to beads is used. In one preferred aspect, a 1:10 CD3:CD28 ratio of antibody bound to beads is used. In one aspect, a 1:3 CD3:CD28 ratio of antibody bound to the beads is used. In yet one aspect, a 3:1 CD3:CD28 ratio of antibody bound to the beads is used.

[0782] Ratios of particles to cells from 1:500 to 500:1 and any integer values in between may be used to stimulate T cells or other target cells. As those of ordinary skill in the art can readily appreciate, the ratio of particles to cells may depend on particle size relative to the target cell. For example, small sized beads could only bind a few cells, while larger beads could bind many. In certain aspects the ratio of cells to particles ranges from 1:100 to 100:1 and any integer values in-between and in further aspects the ratio comprises 1:9 to 9:1 and any integer values in between, can also be used to stimulate T cells. The ratio of anti-CD3- and anti-CD28-coupled particles to T cells that result in T cell stimulation can vary as noted above, however certain preferred values include 1:100, 1:50, 1:40, 1:30, 1:20, 1:10, 1:9, 1:8, 1:7, 1:6, 1:5, 1:4, 1:3, 1:2, 1:1, 2:1, 3:1, 4:1, 5:1, 6:1, 7:1, 8:1, 9:1, 10:1, and 15:1 with one preferred ratio being at least 1:1 particles per T cell. In one aspect, a ratio of particles to cells of 1:1 or less is used. In one particular aspect, a preferred particle: cell ratio is 1:5. In further aspects, the ratio of particles to cells can be varied depending on the day of stimulation. For example, in one aspect, the ratio of particles to cells is from 1:1 to 10:1 on the first day and additional particles are added to the cells every day or every other day thereafter for up to 10 days, at final ratios of from 1:1 to 1:10 (based on cell counts on the day of addition). In one particular aspect, the ratio of particles to cells is 1:1 on the first day of stimulation and adjusted to 1:5 on the third and fifth days of stimulation. In one aspect, particles are added on a daily or every other day basis to a final ratio of 1:1 on the first day, and 1:5 on the third and fifth days of stimulation. In one aspect, the ratio of particles to cells is 2:1 on the first day of stimulation and adjusted to 1:10 on the third and fifth days of stimulation. In one aspect, particles are added on a daily or every other day basis to a final ratio of 1:1 on the first day, and 1:10 on the third and fifth days of stimulation. One of skill in the art will appreciate that a variety of other ratios may be suitable for use in the present invention. In particular, ratios will vary depending on particle size and on cell size and type. In one aspect, the most typical ratios for use are in the neighborhood of 1:1, 2:1 and 3:1 on the first day.

[0783] In further aspects, the cells, such as T cells, are combined with agent-coated beads, the beads and the cells are subsequently separated, and then the cells are cultured. In an alternative aspect, prior to culture, the agent-coated beads and cells are not separated but are cultured together. In a further aspect, the beads and cells are first concentrated by application of a force, such as a magnetic force, resulting in increased ligation of cell surface markers, thereby inducing cell stimulation.

[0784] By way of example, cell surface proteins may be ligated by allowing paramagnetic beads to which anti-CD3 and anti-CD28 are attached (3×28 beads) to contact the T cells. In one aspect the cells (for example, 10⁴ to 10⁹ T cells) and beads (for example, DYNABEADS® M-450 CD3/CD28 T paramagnetic beads at a ratio of 1:1) are combined in a buffer, for example PBS (without divalent cations such as, calcium and magnesium). Again, those of ordinary skill in the art can readily appreciate any cell concentration may be used. For example, the target cell may be very rare in the sample and comprise only 0.01% of the sample or the entire sample (i.e., 100%) may comprise the target cell of interest. Accordingly, any cell number is within the context of the present invention. In certain aspects, it may be desirable to significantly decrease the volume in which particles and cells are mixed together (i.e., increase the concentration of cells), to ensure maximum contact of cells and particles. For example, in one aspect, a concentration of about 10 billion cells/ml, 9 billion/ml, 8 billion/ml, 7 billion/ml, 6 billion/ml, 5 billion/ml, or 2 billion cells/ml is used. In one aspect, greater than 100 million cells/ml is used. In a further aspect, a concentration of cells of 10, 15, 20, 25, 30, 35, 40, 45, or 50 million cells/ml is used. In yet one aspect, a concentration of cells from 75, 80, 85, 90, 95, or 100 million cells/ml is used. In further aspects, concentrations of 125 or 150 million cells/ml can be used. Using high concentrations can result in increased cell yield, cell activation, and cell expansion. Further, use of high cell concentrations allows more efficient capture of cells that may weakly express target antigens of interest, such as CD28-negative T cells. Such populations of cells may have therapeutic value and would be desirable to obtain in certain aspects. For example, using high concentration of cells allows more efficient selection of CD8+ T cells that normally have weaker CD28 expression.

[0785] In one embodiment, cells transduced with a nucleic acid encoding a fusion protein, e.g., as described herein, comprising a domain that includes a CAR, e.g., a CAR described herein, are expanded, e.g., by a method described herein. In one embodiment, the cells are expanded in culture for a period of several hours (e.g., about 2, 3, 4, 5, 6, 7, 8, 9, 10, 15, 18, 21 hours) to about 14 days (e.g., 1, 2, 3, 4, 5, 6, 7, 8, 9, 10, 11, 12, 13 or 14 days). In one embodiment, the cells are expanded for a period of 4 to 9 days. In one embodiment, the cells are expanded for a period of 8 days or less, e.g., 7, 6 or 5 days. In one embodiment, the cells are expanded in culture for 5 days, and the resulting cells are more potent than the same cells expanded in culture for 9 days under the same culture conditions. Potency can be defined, e.g., by various T cell functions, e.g. proliferation, target cell killing, cytokine production, activation, migration, or combinations thereof. In one embodiment, the cells are expanded for 5 days show at least a one, two, three or four fold increase in cells doublings upon antigen stimulation as compared to the same cells expanded in culture for 9 days under the same culture conditions. In one embodiment, the cells are expanded in culture for 5 days, and the resulting cells exhibit higher proinflammatory cytokine production, e.g., IFN-γ and/or GM-CSF levels, as compared to the same cells expanded in culture for 9 days under the same culture conditions. In one embodiment, the cells expanded for 5 days show at least a one, two, three, four, five, ten fold or more increase in pg/ml of proinflammatory cytokine production, e.g., IFN-γ and/or GM-CSF levels, as compared to the same cells expanded in culture for 9 days under the same culture conditions.

[0786] Several cycles of stimulation may also be desired such that culture time of T cells can be 60 days or more. Conditions appropriate for T cell culture include an appropriate media (e.g., Minimal Essential Media or RPMI Media 1640 or, X-vivo 15, (Lonza)) that may contain factors necessary for proliferation and viability, including serum (e.g., fetal bovine or human serum), interleukin-2 (IL-2), insulin, IFN-γ, IL-4, IL-7, GM-CSF, IL-10, IL-12, IL-15, TGFβ, and TNF-α or any other additives for the growth of cells known to the skilled artisan. Other additives for the growth of cells include, but are not limited to, surfactant, plasmanate, and reducing agents such as N-acetyl-cysteine and 2-mercaptoethanol. Media can include RPMI 1640, AIM-V, DMEM, MEM, α-MEM, F-12, X-Vivo 15, and X-Vivo 20, Optimizer, with added amino acids, sodium pyruvate, and vitamins, either serum-free or supplemented with an appropriate amount of serum (or plasma) or a defined set of hormones, and/or an amount of cytokine(s) sufficient for the growth and expansion of T cells. Antibiotics, e.g., penicillin and streptomycin, are included only in experimental cultures, not in cultures of cells that are to be infused into a subject. The target cells are maintained under conditions necessary to support growth, for example, an appropriate temperature (e.g., 37° C.) and atmosphere (e.g., air plus 5% CO₂).

[0787] In one embodiment, the cells are expanded in an appropriate media (e.g., media described herein) that includes one or more interleukin that result in at least a 200-fold (e.g., 200-fold, 250-fold, 300-fold, 350-fold) increase in cells over a 14 day expansion period, e.g., as measured by a method described herein such as flow cytometry. In one embodiment, the cells are expanded in the presence of IL-15 and/or IL-7 (e.g., IL-15 and IL-7).

[0788] In embodiments, methods described herein, e.g., fusion protein, e.g., as described herein, comprising a domain that includes a CAR-expressing cell manufacturing methods, comprise removing T regulatory cells, e.g., CD25+ T cells, from a cell population, e.g., using an anti-CD25 antibody, or fragment thereof, or a CD25-binding ligand, IL-2. Methods of removing T regulatory cells, e.g., CD25+ T cells, from a cell population are described herein. In embodiments, the methods, e.g., manufacturing methods, further comprise contacting a cell population (e.g., a cell population in which T regulatory cells, such as CD25+ T cells, have been depleted; or a cell population that has previously contacted an anti-CD25 antibody, fragment thereof, or CD25-binding ligand) with IL-15 and/or IL-7. For example, the cell population (e.g., that has previously contacted an anti-CD25 antibody, fragment thereof, or CD25-binding ligand) is expanded in the presence of IL-15 and/or IL-7.

[0789] In some embodiments a fusion protein, e.g., as described herein, comprising a domain that includes a CAR-expressing cell described herein is contacted with a composition comprising a interleukin-15 (IL-15) polypeptide, a interleukin-15 receptor alpha (IL-15Ra) polypeptide, or a combination of both a IL-15 polypeptide and a IL-15Ra polypeptide e.g., hetIL-15, during the manufacturing of the CAR-expressing cell, e.g., ex vivo. In embodiments, a CAR-expressing cell described herein is contacted with a composition comprising a IL-15 polypeptide during the manufacturing of the CAR-expressing cell, e.g., ex vivo. In embodiments, a CAR-expressing cell described herein is contacted with a composition comprising a combination of both a IL-15 polypeptide and a IL-15 Ra polypeptide during the manufacturing of the CAR-expressing cell, e.g., ex vivo. In embodiments, a CAR-expressing cell described herein is contacted with a composition comprising hetIL-15 during the manufacturing of the CAR-expressing cell, e.g., ex vivo.

[0790] In one embodiment the fusion protein, e.g., as described herein, comprising a domain that includes a CAR-expressing cell described herein is contacted with a composition comprising hetIL-15 during ex vivo expansion. In an embodiment, the CAR-expressing cell described herein is contacted with a composition comprising an IL-15 polypeptide during ex vivo expansion. In an embodiment, the CAR-expressing cell described herein is contacted with a composition comprising both an IL-15 polypeptide and an IL-15Ra polypeptide during ex vivo expansion. In one embodiment the contacting results in the survival and proliferation of a lymphocyte subpopulation, e.g., CD8+ T cells.

[0791] T cells that have been exposed to varied stimulation times may exhibit different characteristics. For example, typical blood or apheresed peripheral blood mononuclear cell products have a helper T cell population (TH, CD4+) that is greater than the cytotoxic or suppressor T cell population (TC, CD8+). Ex vivo expansion of T cells by stimulating CD3 and CD28 receptors produces a population of T cells that prior to about days 8-9 consists predominately of TH cells, while after about days 8-9, the population of T cells comprises an increasingly greater population of TC cells. Accordingly, depending on the purpose of treatment, infusing a subject with a T cell population comprising predominately of TH cells may be advantageous. Similarly, if an antigen-specific subset of TC cells has been isolated it may be beneficial to expand this subset to a greater degree.

[0792] Further, in addition to CD4 and CD8 markers, other phenotypic markers vary significantly, but in large part, reproducibly during the course of the cell expansion process. Thus, such reproducibility enables the ability to tailor an activated T cell product for specific purposes.

[0793] Once a fusion protein, e.g., as described herein, comprising a domain that includes a CAR, described herein is constructed, various assays can be used to evaluate the activity of the molecule, such as but not limited to, the ability to expand T cells following antigen stimulation, sustain T cell expansion in the absence of re-stimulation, and anti-cancer activities in appropriate in vitro and animal models. Assays to evaluate the effects of a cars of the present disclosureare described in further detail below

[0794] Western blot analysis of fusion protein, e.g., as described herein, comprising a domain that includes a CAR, expression in primary T cells can be used to detect the presence of monomers and dimers. See, e.g., Milone et al., Molecular Therapy 17(8): 1453-1464 (2009). Very briefly, T cells (1:1 mixture of CD4⁺ and CD8⁺ T cells) expressing the CARs are expanded in vitro for more than 10 days followed by lysis and SDS-PAGE under reducing conditions. CARs containing the full length TCR-ζ cytoplasmic domain and the endogenous TCR-ζ chain are detected by western blotting using an antibody to the TCR-ζ chain. The same T cell subsets are used for SDS-PAGE analysis under non-reducing conditions to permit evaluation of covalent dimer formation.

[0795] In vitro expansion of fusion protein⁺, e.g., as described herein, comprising a domain that includes a CAR, e.g., CAR⁺, T cells following antigen stimulation can be measured by flow cytometry. For example, a mixture of CD4⁺ and CD8+ T cells are stimulated with αCD3/αCD28 aAPCs followed by transduction with lentiviral vectors expressing GFP under the control of the promoters to be analyzed. Exemplary promoters include the CMV IE gene, EF-1α, ubiquitin C, or phosphoglycerokinase (PGK) promoters. GFP fluorescence is evaluated on day 6 of culture in the CD4⁺ and/or CD8⁺ T cell subsets by flow cytometry. See, e.g., Milone et al., Molecular Therapy 17(8): 1453-1464 (2009). Alternatively, a mixture of CD4⁺ and CD8⁺ T cells are stimulated with αCD3/αCD28 coated magnetic beads on day 0, and transduced with CAR on day 1 using a bicistronic lentiviral vector expressing CAR along with eGFP using a 2A ribosomal skipping sequence. Cultures are re-stimulated with either a cancer associated antigen as described herein⁺ K562 cells (K562 expressing a cancer associated antigen as described herein), wild-type K562 cells (K562 wild type) or K562 cells expressing hCD32 and 4-1BBL in the presence of antiCD3 and anti-CD28 antibody (K562-BBL-3/28) following washing. Exogenous IL-2 is added to the cultures every other day at 100 IU/ml. GFP⁺ T cells are enumerated by flow cytometry using bead-based counting. See, e.g., Milone et al., Molecular Therapy 17(8): 1453-1464 (2009).

[0796] Sustained fusion protein⁺, e.g., as described herein, comprising a domain that includes a CAR, e.g., CAR⁺, T cell expansion in the absence of re-stimulation can also be measured. See, e.g., Milone et al., Molecular Therapy 17(8): 1453-1464 (2009). Briefly, mean T cell volume (fl) is measured on day 8 of culture using a Coulter Multisizer III particle counter, a Nexcelom Cellometer Vision or Millipore Scepter, following stimulation with αCD3/αCD28 coated magnetic beads on day 0, and transduction with the indicated CAR on day 1.

[0797] Animal models can also be used to measure a CART activity. For example, xenograft model using human a cancer associated antigen described herein-specific CAR⁺ T cells to treat a primary human pre-B ALL in immunodeficient mice can be used. See, e.g., Milone et al., Molecular Therapy 17(8): 1453-1464 (2009). Very briefly, after establishment of ALL, mice are randomized as to treatment groups. Different numbers of a cancer associated antigen-specific CAR engineered T cells are coinjected at a 1:1 ratio into NOD-SCID-γ^{-/-} mice bearing B-ALL. The number of copies of a cancer associated antigen-specific CAR vector in spleen DNA from mice is evaluated at various times following T cell injection. Animals are assessed for leukemia at weekly intervals. Peripheral blood a cancer associate antigen as described herein⁺ B-ALL blast cell counts are measured in mice that are injected with a cancer associated antigen described herein-ζ CAR⁺ T cells or mock-transduced T cells. Survival curves for the groups are compared using the log-rank test. In addition, absolute peripheral blood CD4⁺ and CD8⁺ T cell counts 4 weeks following T cell injection in NOD-SCID-γ^{-/-} mice can also be analyzed. Mice are injected with leukemic cells and 3 weeks later are injected with T cells engineered to express CAR by a bicistronic lentiviral vector that encodes the CAR linked to eGFP. T cells are normalized to 45-50% input GFP⁺ T cells by mixing with mock-transduced cells prior to injection, and confirmed by flow cytometry. Animals are assessed for leukemia at 1-week intervals. Survival curves for the CAR⁺ T cell groups are compared using the log-rank test.

[0798] Dose dependent fusion protein, e.g., as described herein, comprising a domain that includes a CAR, treatment response can be evaluated. See, e.g., Milone et al., Molecular Therapy 17(8): 1453-1464 (2009). For example, peripheral blood is obtained 35-70 days after establishing leukemia in mice injected on day 21 with CAR T cells, an equivalent number of mock-transduced T cells, or no T cells. Mice from each group are randomly bled for determination of peripheral blood a cancer associate antigen as described herein⁺ ALL blast counts and then killed on days 35 and 49. The remaining animals are evaluated on days 57 and 70.

[0799] Assessment of cell proliferation and cytokine production has been previously described, e.g., at Milone et al., Molecular Therapy 17(8): 1453-1464 (2009). Briefly, assessment of CAR-mediated proliferation is performed in microtiter plates by mixing washed T cells with K562 cells expressing a cancer associated antigen described herein (K19) or CD32 and CD137 (KT32-BBL) for a final T-cell:K562 ratio of 2:1. K562 cells are irradiated with gamma-radiation prior to use. Anti-CD3 (clone OKT3) and anti-CD28 (clone 9.3) monoclonal antibodies are added to cultures with KT32-BBL cells to serve as a positive control for stimulating T-cell proliferation since these signals support long-term CD8⁺ T cell expansion ex vivo. T cells are enumerated in cultures using CountBright™ fluorescent beads (Invitrogen, Carlsbad, Calif.) and flow cytometry as described by the manufacturer. CAR+ T cells are identified by GFP expression using T cells that are engineered with eGFP-2A linked CAR-expressing lentiviral vectors. For CAR+ T cells not expressing GFP, the CAR+ T cells are detected with biotinylated recombinant a cancer associate antigen as described herein protein and a secondary avidin-PE conjugate. CD4+ and CD8⁺ expression on T cells are also simultaneously detected with specific monoclonal antibodies (BD Biosciences). Cytokine measurements are performed on supernatants collected 24 hours following re-stimulation using the human TH1/TH2 cytokine cytometric bead array kit (BD Biosciences, San Diego, Calif.) according the manufacturer's instructions. Fluorescence is assessed using a FACScalibur flow cytometer, and data is analyzed according to the manufacturer's instructions.

[0800] Cytotoxicity can be assessed by a standard 51Cr-release assay. See, e.g., Milone et al., Molecular Therapy 17(8): 1453-1464 (2009). Briefly, target cells (K562 lines and primary pro-B-ALL cells) are loaded with 51Cr (as NaCrO4, New England Nuclear, Boston, Mass.) at 37° C. for 2 hours with frequent agitation, washed twice in complete RPMI and plated into microtiter plates. Effector T cells are mixed with target cells in the wells in complete RPMI at varying ratios of effector cell:target cell (E:T). Additional wells containing media only (spontaneous release, SR) or a 1% solution of triton-X 100 detergent (total release, TR) are also prepared. After 4 hours of incubation at 37° C., supernatant from each well is harvested. Released 51Cr is then measured using a gamma particle counter (Packard Instrument Co., Waltham, Mass.). Each condition is performed in at least triplicate, and the percentage of lysis is calculated using the formula: % Lysis=(ER−SR)/(TR−SR), where ER represents the average 51Cr released for each experimental condition.

[0801] Imaging technologies can be used to evaluate specific trafficking and proliferation of CARs in tumor-bearing animal models. Such assays have been described, for example, in Barrett et al., Human Gene Therapy 22:1575-1586 (2011). Briefly, NOD/SCID/γc^{-/-} (NSG) mice are injected IV with Nalm-6 cells followed 7 days later with T cells 4 hour after electroporation with the CAR constructs. The T cells are stably transfected with a lentiviral construct to express firefly luciferase, and mice are imaged for bioluminescence. Alternatively, therapeutic efficacy and specificity of a single injection of CAR⁺ T cells in Nalm-6 xenograft model can be measured as the following: NSG mice are injected with Nalm-6 transduced to stably express firefly luciferase, followed by a single tail-vein injection of T cells electroporated with cars of the present disclosure 7 days later. Animals are imaged at various time points post injection. For example, photon-density heat maps of firefly luciferasepositive leukemia in representative mice at day 5 (2 days before treatment) and day 8 (24 hr post CAR⁺ PBLs) can be generated.

[0802] Other assays, including those described in the Example section herein as well as those that are known in the art can also be used to evaluate the CARs described herein.

[0803] Methods of Making CAR-Expressing Cells

[0804] In another aspect, the invention pertains to a method of making a cell (e.g., an immune effector cell or population thereof) comprising introducing into (e.g., transducing) a cell, e.g., a T cell or a NK cell described herein, with a vector of comprising a nucleic acid encoding a fusion protein, e.g., as described herein, comprising a domain that includes a CAR, e.g., a CAR described herein; or a nucleic acid encoding a CAR molecule e.g., a CAR described herein.

[0805] The cell in the methods is an immune effector cell (e.g., aT cell or a NK cell, or a combination thereof). In some embodiments, the cell in the methods is diaglycerol kinase (DGK) and/or Ikaros deficient.

[0806] In some embodiment, the introducing the nucleic acid molecule encoding a CAR comprises transducing a vector comprising the nucleic acid molecule encoding a fusion protein, e.g., as described herein, comprising a domain that includes a CAR, or transfecting the nucleic acid molecule encoding a CAR, wherein the nucleic acid molecule is an in vitro transcribed RNA.

[0807] In some embodiments, the method further comprises:

[0808] providing a population of immune effector cells (e.g., T cells or NK cells); and

[0809] removing T regulatory cells from the population, thereby providing a population of T regulatory-depleted cells;

[0810] wherein steps a) and b) are performed prior to introducing the nucleic acid encoding the fusion protein, e.g., as described herein, comprising a domain that includes a CAR, to the population.

[0811] In embodiments of the methods, the T regulatory cells comprise CD25+ T cells, and are removed from the cell population using an anti-CD25 antibody, or fragment thereof. The anti-CD25 antibody, or fragment thereof, can be conjugated to a substrate, e.g., a bead.

[0812] In other embodiments, the population of T regulatory-depleted cells provided from step (b) contains less than 30%, 25%, 20%, 15%, 10%, 5%, 4%, 3%, 2%, 1% of CD25+ cells.

[0813] In yet other embodiments, the method further comprises removing cells from the population which express a tumor antigen that does not comprise CD25 to provide a population of T regulatory-depleted and tumor antigen depleted cells prior to introducing the nucleic acid encoding a fusion protein, e.g., as described herein, comprising a domain that includes a CAR, to the population. The tumor antigen can be selected from CD19, CD30, CD38, CD123, CD20, CD14 or CD11b, or a combination thereof.

[0814] In other embodiments, the method further comprises removing cells from the population which express a checkpoint inhibitor, to provide a population of T regulatory-depleted and inhibitory molecule depleted cells prior to introducing the nucleic acid encoding a fusion protein, e.g., as described herein, comprising a domain that includes a CAR, to the population. The checkpoint inhibitor can be chosen from PD-1, LAG-3, TIM3, B7-H1, CD160, P1H, 2B4, CEACAM (e.g., CEACAM-1, CEACAM-3, and/or CEACAM-5), TIGIT, CTLA-4, BTLA, and LAIR1.

[0815] Further embodiments disclosed herein encompass providing a population of immune effector cells. The population of immune effector cells provided can be selected based upon the expression of one or more of CD3, CD28, CD4, CD8, CD45RA, and/or CD45RO. In certain embodiments, the population of immune effector cells provided are CD3+ and/or CD28+.

[0816] In certain embodiments of the method, the method further comprises expanding the population of cells after the nucleic acid molecule encoding a fusion protein, e.g., as described herein, comprising a domain that includes a CAR, has been introduced.

[0817] In embodiments, the population of cells is expanded for a period of 8 days or less.

[0818] In certain embodiments, the population of cells is expanded in culture for 5 days, and the resulting cells are more potent than the same cells expanded in culture for 9 days under the same culture conditions.

[0819] In other embodiments, the population of cells is expanded in culture for 5 days show at least a one, two, three or four fold increase in cell doublings upon antigen stimulation as compared to the same cells expanded in culture for 9 days under the same culture conditions.

[0820] In yet other embodiments, the population of cells is expanded in culture for 5 days, and the resulting cells exhibit higher proinflammatory IFN-γ and/or GM-CSF levels, as compared to the same cells expanded in culture for 9 days under the same culture conditions.

[0821] In other embodiments, the population of cells is expanded by culturing the cells in the presence of an agent that stimulates a CD3/TCR complex associated signal and/or a ligand that stimulates a costimulatory molecule on the surface of the cells. The agent can be a bead conjugated with anti-CD3 antibody, or a fragment thereof, and/or anti-CD28 antibody, or a fragment thereof.

[0822] In other embodiments, the population of cells is expanded in an appropriate media that includes one or more interleukin that result in at least a 200-fold, 250-fold, 300-fold, or 350-fold increase in cells over a 14 day expansion period, as measured by flow cytometry.

[0823] In other embodiments, the population of cells is expanded in the presence IL-15 and/or IL-7.

[0824] In certain embodiments, the method further includes cryopresercing he population of the cells after the appropriate expansion period.

[0825] In yet other embodiments, the method of making disclosed herein further comprises contacting the population of immune effector cells with a nucleic acid encoding a telomerase subunit, e.g., hTERT. The the nucleic acid encoding the telomerase subunit can be DNA.

[0826] The present disclosure also provides a method of generating a population of RNA-engineered cells, e.g., cells described herein, e.g., immune effector cells (e.g., T cells, NK cells), transiently expressing exogenous RNA. The method comprises introducing an in vitro transcribed RNA or synthetic RNA into a cell, where the RNA comprises a nucleic acid encoding a fusion protein, e.g., as described herein, comprising a domain that includes a CAR molecule, described herein.

[0827] In another aspect, the invention pertains to a method of providing an anti-tumor immunity in a subject comprising administering to the subject an effective amount of a cell comprising a fusion protein, e.g., as described herein, comprising a domain that includes a CAR molecule, e.g., a cell expressing a CAR molecule described herein. In one embodiment, the cell is an autologous T cell or NK cell. In one embodiment, the cell is an allogeneic T cell or NK cell. In one embodiment, the subject is a human.

[0828] In one aspect, the invention includes a population of autologous cells that are transfected or transduced with a vector comprising a nucleic acid molecule encoding a fusion protein, e.g., as described herein, comprising a domain that includes a CAR molecule, e.g., as described herein. In one embodiment, the vector is a retroviral vector. In one embodiment, the vector is a self-inactivating lentiviral vector as described elsewhere herein. In one embodiment, the vector is delivered (e.g., by transfecting or electroporating) to a cell, e.g., a T cell or a NK cell, wherein the vector comprises a nucleic acid molecule encoding a CAR of the present disclosure as described herein, which is transcribed as an mRNA molecule, and the CARs of the present disclosure is translated from the RNA molecule and expressed on the surface of the cell.

[0829] In another aspect, the present disclosure provides a population of fusion protein, e.g., as described herein, comprising a domain that includes a CAR-expressing cells, e.g., CAR-expressing immune effector cells (e.g., T cells or NK cells). In some embodiments, the population of CAR-expressing cells comprises a mixture of cells expressing different CARs. For example, in one embodiment, the population of CAR-expressing immune effector cells (e.g., T cells or NK cells) can include a first cell expressing a CAR having an antigen binding domain that binds to a first tumor antigen as described herein, and a second cell expressing a CAR having a different antigen binding domain that binds to a second tumor antigen as described herein. As another example, the population of CAR-expressing cells can include a first cell expressing a CAR that includes an antigen binding domain that binds to a tumor antigen as described herein, and a second cell expressing a CAR that includes an antigen binding domain to a target other than a tumor antigen as described herein. In one embodiment, the population of CAR-expressing cells includes, e.g., a first cell expressing a CAR that includes a primary intracellular signaling domain, and a second cell expressing a CAR that includes a secondary signaling domain, e.g., a costimulatory signaling domain.

[0830] In another aspect, the present disclosure provides a population of cells wherein at least one cell in the population expresses a fusion protein, e.g., as described herein, comprising a domain that includes a CAR having an antigen binding domain that binds to a tumor antigen as described herein, and a second cell expressing another agent, e.g., an agent which enhances the activity of a CAR-expressing cell. For example, in one embodiment, the agent can be an agent which inhibits an inhibitory molecule. Examples of inhibitory molecules include PD-1, PD-L1, CTLA-4, TIM-3, CEACAM (e.g., CEACAM-1, CEACAM-3 and/or CEACAM-5), LAG-3, VISTA, BTLA, TIGIT, LAIR1, CD160, 2B4 and TGFR beta. In one embodiment, the agent which inhibits an inhibitory molecule, e.g., is a molecule described herein, e.g., an agent that comprises a first polypeptide, e.g., an inhibitory molecule, associated with a second polypeptide that provides a positive signal to the cell, e.g., an intracellular signaling domain described herein. In one embodiment, the agent comprises a first polypeptide, e.g., of an inhibitory molecule such as PD-1, LAG-3, CTLA-4, CD160, BTLA, LAIR1, TIM-3, CEACAM (e.g., CEACAM-1, CEACAM-3 and/or CEACAM-5), 2B4 and TIGIT, or a fragment of any of these, and a second polypeptide which is an intracellular signaling domain described herein (e.g., comprising a costimulatory domain (e.g., 41BB, CD27 or CD28, e.g., as described herein) and/or a primary signaling domain (e.g., a CD3 zeta signaling domain described herein). In one embodiment, the agent comprises a first polypeptide of PD-1 or a fragment thereof, and a second polypeptide of an intracellular signaling domain described herein (e.g., a CD28, CD27, OX40 or 4-IBB signaling domain described herein and/or a CD3 zeta signaling domain described herein).

[0831] In one embodiment, the nucleic acid molecule encoding a fusion protein, e.g., as described herein, comprising a domain that includes a CAR of the present disclosure molecule, e.g., as described herein, is expressed as an mRNA molecule. In one embodiment, the genetically modified CAR of the present invention-expressing cells, e.g., immune effector cells (e.g., T cells, NK cells), can be generated by transfecting or electroporating an RNA molecule encoding the desired CARs (e.g., without a vector sequence) into the cell. In one embodiment, a CAR of the present disclosure molecule is translated from the RNA molecule once it is incorporated and expressed on the surface of the recombinant cell.

[0832] A method for generating mRNA for use in transfection involves in vitro transcription (IVT) of a template with specially designed primers, followed by polyA addition, to produce a construct containing 3′ and 5′ untranslated sequence (“UTR”) (e.g., a 3′ and/or 5′ UTR described herein), a 5′ cap (e.g., a 5′ cap described herein) and/or Internal Ribosome Entry Site (IRES) (e.g., an IRES described herein), the nucleic acid to be expressed, and a polyA tail, typically 50-5000 bases in length (SEQ ID NO:32). RNA so produced can efficiently transfect different kinds of cells. In one embodiment, the template includes sequences for the fusion protein, e.g., as described herein, comprising a domain that includes a CAR. In an embodiment, an RNA fusion protein, e.g., as described herein, comprising a domain that includes a CAR, vector is transduced into a cell, e.g., a T cell or a NK cell, by electroporation.

[0833] In one embodiment, the fusion protein, e.g., as described herein, comprising a domain that includes a CAR, is introduced into immune effector cells (e.g., T cells, NK cells), e.g., using in vitro transcription, and the subject (e.g., human) receives an initial administration of fusion protein, e.g., as described herein, comprising a domain that includes a CAR, immune effector cells (e.g., T cells, NK cells) of the invention, and one or more subsequent administrations of the fusion protein, e.g., as described herein, comprising a domain that includes a CAR, immune effector cells (e.g., T cells, NK cells) of the invention, wherein the one or more subsequent administrations are administered less than 15 days, e.g., 14, 13, 12, 11, 10, 9, 8, 7, 6, 5, 4, 3, or 2 days after the previous administration. In one embodiment, more than one administration of the CAR immune effector cells (e.g., T cells, NK cells) of the invention are administered to the subject (e.g., human) per week, e.g., 2, 3, or 4 administrations of the CAR immune effector cells (e.g., T cells, NK cells) of the invention are administered per week. In one embodiment, the subject (e.g., human subject) receives more than one administration of the CAR immune effector cells (e.g., T cells, NK cells) per week (e.g., 2, 3 or 4 administrations per week) (also referred to herein as a cycle), followed by a week of no CAR immune effector cells (e.g., T cells, NK cells) administrations, and then one or more additional administration of the CAR immune effector cells (e.g., T cells, NK cells) (e.g., more than one administration of the CAR immune effector cells (e.g., T cells, NK cells) per week) is administered to the subject. In another embodiment, the subject (e.g., human subject) receives more than one cycle of CAR immune effector cells (e.g., T cells, NK cells), and the time between each cycle is less than 10, 9, 8, 7, 6, 5, 4, or 3 days. In one embodiment, the CAR immune effector cells (e.g., T cells, NK cells) are administered every other day for 3 administrations per week. In one embodiment, the CAR immune effector cells (e.g., T cells, NK cells) of the invention are administered for at least two, three, four, five, six, seven, eight or more weeks.

[0834] In one aspect, CAR-expressing cells are generated using lentiviral viral vectors, such as lentivirus. Cells, e.g., CARTs, generated that way will have stable CAR expression.

[0835] In one aspect, CAR-expressing cells, e.g., CARTs, are generated using a viral vector such as a gammaretroviral vector, e.g., a gammaretroviral vector described herein. CARTs generated using these vectors can have stable CAR expression.

[0836] In one aspect, CARTs transiently express CAR vectors for 4, 5, 6, 7, 8, 9, 10, 11, 12, 13, 14, 15 days after transduction. Transient expression of CARs can be effected by RNA CAR vector delivery. In one aspect, the CAR RNA is transduced into the T cell by electroporation.

[0837] A potential issue that can arise in patients being treated using transiently expressing CAR immune effector cells (e.g., T cells, NK cells) (particularly with murine scFv bearing CARTs) is anaphylaxis after multiple treatments.

[0838] Without being bound by this theory, it is believed that such an anaphylactic response might be caused by a patient developing humoral anti-CAR response, i.e., anti-CAR antibodies having an anti-IgE isotype. It is thought that a patient's antibody producing cells undergo a class switch from IgG isotype (that does not cause anaphylaxis) to IgE isotype when there is a ten to fourteen day break in exposure to antigen. If a patient is at high risk of generating an anti-CAR antibody response during the course of transient CAR therapy (such as those generated by RNA transductions), CART infusion breaks should not last more than ten to fourteen days.

[0839] Methods of Conditionally Expressing a Protein and Therapeutic Application

[0840] Provided herein are also methods of conditionally expressing a fusion protein (e.g., comprising a CAR polypeptide). Such methods can include contacting a host cell comprising any of the fusion proteins described herein or a nucleic acid encoding such a fusion protein with a expression compound, e.g., a deaggregation compound or stabilization compound.

[0841] In the presence of the stabilization compound, the degradation domain of the fusion protein assumes a conformation resistant to cellular degradation, and a protease cleaves the protease cleavage site within the fusion protein, thereby resulting in cleavage of the degradation domain from the desired protein and the expression of the desired protein. In the absence of the stabilization compound, the degradation domain of the fusion protein assumes a conformation permissive to cellular degradation, which results in degradation of the fusion protein. In some embodiments, the host cell is contacted with the stabilization compound in vivo. In some embodiments, the host cell is contacted with the stabilization compound ex vivo.

[0842] In the presence of the deaggregation compound, the deaggregation domain of the fusion protein assumes a conformation resistant to oligomerization (e.g., dimerization), causing the fusion protein to enter a monomeric state accessible to a protease, and a protease cleaves the protease cleavage site within the fusion protein, thereby resulting in cleavage of the aggregation domain from the desired protein and the expression of the desired protein. In the absence of the deaggregation compound, the deaggregation domain of the fusion protein assumes a conformation permissive to dimerization, causing the fusion protein to enter into an oligomeric, e.g., dimeric, e.g., aggregated state. The oligomeric, e.g., dimeric, e.g., aggregated state prevents the fusion protein from moving between cellular compartments or from being secreted. The oligomeric, e.g., dimeric, e.g., aggregated state is inaccessible to protease. In some embodiments, the host cell is contacted with the deaggregation compound in vivo. In some embodiments, the host cell is contacted with the deaggregation compound ex vivo.

[0843] The stabilization compound can be selected based on the degradation domain. For example, when the degradation domain is derived from an estrogen receptor, the stabilization compound can be selected from Bazedoxifene or 4-hydroxy tamoxifen (4-OHT). Tamoxifen and Bazedoxifene are FDA approved drugs, and thus are safe to use in human. If the degradation domain is derived from an FKB protein, the stabilization compound can be Shield1.

[0844] The deaggregation compound can be selected based on the deaggregation domain. For example, when the deaggregation domain is derived from FKBP, the deaggregation compound can be selected from FK506, rapamycin, AP22542, or AP21998.

[0845] In another aspect, the present disclosure provides methods comprising administering a fusion protein of the invention as a therapy. Typically, such administration will be in the form of host cells (e.g., autologous or allogeneic host cells) expressing the fusion protein of invention to the subject. Accordingly, through administration of a corresponding stabilization compound (either in vivo or ex vivo), the expression of the therapeutic (i.e., the protein remaining after cleavage of the degradation domain) can be regulated. Accordingly, through administration of a corresponding deaggregation compound (either in vivo or ex vivo), the expression of the therapeutic (i.e., the protein remaining after cleavage of the aggregation domain) can be regulated. Thus, expression of known synthetic therapeutic proteins or transmembrane receptors (e.g., a fusion protein, e.g., as described herein, comprising a domain that includes a CAR molecule described herein) can be regulated. In one embodiment, the subject has a disorder described herein, e.g., the subject has cancer, e.g., the subject has a cancer which expresses a target antigen described herein. In one embodiment, the subject is a human.

[0846] Provided herein are methods of treating a subject having a disease associated with expression of a tumor antigen by administering to the subject an effective amount of a host cell comprising any of the fusion proteins described herein or a nucleic acid encoding such a fusion protein. In some embodiments, the fusion protein comprises a chimeric antigen receptor (CAR), which comprises, in an N-terminal to C-terminal direction, an antigen binding domain that specifically binds the tumor antigen, a transmembrane domain, and one or more intracellular signaling domains. In some embodiments, the host cell is autologous to the subject. In some embodiments, the host cell is allogenic to said subject. In some embodiments, the host cell is contacted with an expression compound, e.g., stabilization compound or deaggregation compound. In the presence of the stabilization compound, the degradation domain of the fusion protein assumes a conformation resistant to cellular degradation, and a protease cleaves the protease cleavage site within the fusion protein, thereby results in cleavage of the degradation domain from the desired protein and the expression of the desired protein. In the absence of the stabilization compound, the degradation domain of the fusion protein assumes a conformation permissive to cellular degradation, which results in degradation of the fusion protein. In the presence of the deaggregation compound, the aggregation domain of the fusion protein assumes a conformation resistant to oligomerization or aggregation, and a protease cleaves the protease cleavage site within the fusion protein, thereby resulting in cleavage of the aggregation domain from the desired protein and the expression of the desired protein. In the absence of the deaggregation compound, the aggregation domain of the fusion protein assumes a conformation permissive to oligomerization or aggregation, which results in aggregation of the fusion protein.

[0847] In another aspect, the invention pertains to a method of treating a subject having a disease associated with expression of a cancer associated antigen as described herein comprising administering to the subject an effective amount of a cell comprising a fusion protein comprising a CAR molecule, e.g., a fusion protein comprising a CAR molecule described herein.

[0848] In yet another aspect, the invention features a method of treating a subject having a disease associated with expression of a tumor antigen (e.g., an antigen described herein), comprising administering to the subject an effective amount of a cell, e.g., an immune effector cell (e.g., a population of immune effector cells) comprising a fusion protein comprising a CAR molecule, wherein the CAR molecule comprises an antigen binding domain, a transmembrane domain, and an intracellular domain, said intracellular domain comprises a costimulatory domain and/or a primary signaling domain, wherein said antigen binding domain binds to the tumor antigen associated with the disease, e.g. a tumor antigen as described herein.

[0849] In a related aspect, the invention features a method of treating a subject having a disease associated with expression of a tumor antigen. The method comprises administering to the subject an effective amount of a cell, e.g., an immune effector cell (e.g., a population of immune effector cells), comprising a fusion protein comprising a CAR molecule, in combination with an agent that increases the efficacy of the immune cell, wherein:
[0850] the agent that increases the efficacy of the immune cell is chosen from one or more of:
[0851] (i) a protein phosphatase inhibitor;
[0852] (ii) a kinase inhibitor;
[0853] (iii) a cytokine;
[0854] (iv) an inhibitor of an immune inhibitory molecule; or
[0855] (v) an agent that decreases the level or activity of a T_{REG} cell.

[0856] In another aspect, the invention features a composition comprising an immune effector cell (e.g., a population of immune effector cells) comprising a fusion protein comprising a CAR molecule (e.g., a fusion protein comprising a CAR molecule as described herein) for use in the treatment of a subject having a disease associated with expression of a tumor antigen, e.g., a disorder as described herein.

[0857] In certain embodiments of any of the aforesaid methods or uses, the disease associated with a tumor antigen, e.g., a tumor antigen described herein, is selected from a proliferative disease such as a cancer or malignancy or a precancerous condition such as a myelodysplasia, a myelodysplastic syndrome or a preleukemia, or is a non-cancer related indication associated with expression of a tumor antigen described herein. In one embodiment, the disease is a cancer described herein, e.g., a cancer described herein as being associated with a target described herein. In one embodiment, the disease is a hematologic cancer. In one embodiment, the hematologic cancer is leukemia. In one embodiment, the cancer is selected from the group consisting of one or more acute leukemias including but not limited to B-cell acute lymphoid leukemia (“BALL”), T-cell acute lymphoid leukemia (“TALL”), acute lymphoid leukemia (ALL); one or more chronic leukemias including but not limited to chronic myelogenous leukemia (CML), chronic lymphocytic leukemia (CLL); additional hematologic cancers or hematologic conditions including, but not limited to B cell prolymphocytic leukemia, blastic plasmacytoid dendritic cell neoplasm, Burkitt's lymphoma, diffuse large B cell lymphoma, follicular lymphoma, hairy cell leukemia, small cell- or a large cell-follicular lymphoma, malignant lymphoproliferative conditions, MALT lymphoma, mantle cell lymphoma, Marginal zone lymphoma, multiple myeloma, myelodysplasia and myelodysplastic syndrome, non-Hodgkin lymphoma, Hodgkin lymphoma, plasmablastic lymphoma, plasmacytoid dendritic cell neoplasm, Waldenstrom macroglobulinemia, and “preleukemia” which are a diverse collection of hematological conditions united by ineffective production (or dysplasia) of myeloid blood cells, and to disease associated with expression of a tumor antigen described herein include, but not limited to, atypical and/or non-classical cancers, malignancies, precancerous conditions or proliferative diseases expressing a tumor antigen as described herein; and any combination thereof. In another embodiment, the disease associated with a tumor antigen described herein is a solid tumor.

[0858] In certain embodiments, the methods or uses are carried out in combination with an agent that increases the efficacy of the immune effector cell, e.g., an agent as described herein.

[0859] In any of the aforesaid methods or uses, the disease associated with expression of the tumor antigen is selected from the group consisting of a proliferative disease, a precancerous condition, a cancer, and a non-cancer related indication associated with expression of the tumor antigen.

[0860] The cancer can be a hematologic cancer, e.g., a cancer chosen from one or more of chronic lymphocytic leukemia (CLL), acute leukemias, acute lymphoid leukemia (ALL), B-cell acute lymphoid leukemia (B-ALL), T-cell acute lymphoid leukemia (T-ALL), chronic myelogenous leukemia (CML), B cell prolymphocytic leukemia, blastic plasmacytoid dendritic cell neoplasm, Burkitt's lymphoma, diffuse large B cell lymphoma, follicular lymphoma, hairy cell leukemia, small cell- or a large cell-follicular lymphoma, malignant lymphoproliferative conditions, MALT lymphoma, mantle cell lymphoma, marginal zone lymphoma, multiple myeloma, myelodysplasia and myelodysplastic syndrome, non-Hodgkin's lymphoma, Hodgkin's lymphoma, plasmablastic lymphoma, plasmacytoid dendritic cell neoplasm, Waldenstrom macroglobulinemia, or pre-leukemia.

[0861] The cancer can also be chosen from colon cancer, rectal cancer, renal-cell carcinoma, liver cancer, non-small cell carcinoma of the lung, cancer of the small intestine, cancer of the esophagus, melanoma, bone cancer, pancreatic cancer, skin cancer, cancer of the head or neck, cutaneous or intraocular malignant melanoma, uterine cancer, ovarian cancer, rectal cancer, cancer of the anal region, stomach cancer, testicular cancer, uterine cancer, carcinoma of the fallopian tubes, carcinoma of the endometrium, carcinoma of the cervix, carcinoma of the vagina, carcinoma of the vulva, Hodgkin's Disease, non-Hodgkin's lymphoma, cancer of the endocrine system, cancer of the thyroid gland, cancer of the parathyroid gland, cancer of the adrenal gland, sarcoma of soft tissue, cancer of the urethra, cancer of the penis, solid tumors of childhood, cancer of the bladder, cancer of the kidney or ureter, carcinoma of the renal pelvis, neoplasm of the central nervous system (CNS), primary CNS lymphoma, tumor angiogenesis, spinal axis tumor, brain stem glioma, pituitary adenoma, Kaposi's sarcoma, epidermoid cancer, squamous cell cancer, T-cell lymphoma, environmentally induced cancers, combinations of said cancers, and metastatic lesions of said cancers.

[0862] In certain embodiments of the methods or uses described herein, the cell is administered in combination with an agent that increases the efficacy of the cell, e.g., one or more of a protein phosphatase inhibitor, a kinase inhibitor, a cytokine, an inhibitor of an immune inhibitory molecule; or an agent that decreases the level or activity of a T_{REG} cell.

[0863] In certain embodiments of the methods or uses described herein, the protein phosphatase inhibitor is a SHP-1 inhibitor and/or an SHP-2 inhibitor.

[0864] In other embodiments of the methods or uses described herein, kinase inhibitor is chosen from one or more of a CDK4 inhibitor, a CDK4/6 inhibitor (e.g., palbociclib), a BTK inhibitor (e.g., ibrutinib or RN-486), an mTOR inhibitor (e.g., rapamycin or everolimus (RAD001)), an MNK inhibitor, or a dual P13K/mTOR inhibitor. In one embodiment, the BTK inhibitor does not reduce or inhibit the kinase activity of interleukin-2-inducible kinase (ITK).

[0865] In other embodiments of the methods or uses described herein, the agent that inhibits the immune inhibitory molecule comprises an antibody or antibody fragment, an inhibitory nucleic acid, a clustered regularly interspaced short palindromic repeats (CRISPR), a transcription-activator like effector nuclease (TALEN), or a zinc finger endonuclease (ZFN) that inhibits the expression of the inhibitory molecule.

[0866] In other embodiments of the methods or uses described herein, the agent that decreases the level or activity of the TREG cells is chosen from cyclophosphamide, anti-GITR antibody, CD25-depletion, or a combination thereof.

[0867] In certain embodiments of the methods or uses described herein, the immune inhibitory molecule is selected from the group consisting of PD1, PD-L1, CTLA-4, TIM-3, LAG-3, VISTA, BTLA, TIGIT, LAIR1, CD160, 2B4, TGFR beta, CEACAM-1, CEACAM-3, and CEACAM-5.

[0868] In other embodiments, the agent that inhibits the inhibitory molecule comprises a first polypeptide comprising an inhibitory molecule or a fragment thereof and a second polypeptide that provides a positive signal to the cell, and wherein the first and second polypeptides are expressed on the CAR-containing immune cells, wherein (i) the first polypeptide comprises PD1, PD-L1, CTLA-4, TIM-3, LAGS, VISTA, BTLA, TIGIT, LAIR1, CD160, 2B4, TGFR beta, CEACAM-1, CEACAM-3, and CEACAM-5 or a fragment thereof; and/or (ii) the second polypeptide comprises an intracellular signaling domain comprising a primary signaling domain and/or a costimulatory signaling domain. In one embodiment, the primary signaling domain comprises a functional domain of CD3 zeta; and/or the costimulatory signaling domain comprises a functional domain of a protein selected from 41BB, CD27 and CD28.

[0869] In other embodiments, the cytokine is chosen from IL-7, IL-15, IL-18, or IL-21, or a combination thereof.

[0870] In other embodiments, the immune effector cell comprising the fusion protein and a second, e.g., any of the combination therapies disclosed herein (e.g., the agent that that increases the efficacy of the immune effector cell) are administered substantially simultaneously or sequentially.

[0871] In other embodiments, the immune cell comprising the fusion protein is administered in combination with a molecule that targets GITR and/or modulates GITR function. In certain embodiments, the molecule targeting GITR and/or modulating GITR function is administered prior to the CAR-expressing cell or population of cells, or prior to apheresis.

[0872] In one embodiment, lymphocyte infusion, for example allogeneic lymphocyte infusion, is used in the treatment of the cancer, wherein the lymphocyte infusion comprises at least one CAR-expressing cell of the present invention. In one embodiment, autologous lymphocyte infusion is used in the treatment of the cancer, wherein the autologous lymphocyte infusion comprises at least one CAR-expressing cell described herein.

[0873] In one embodiment, the cell is a T cell and the T cell is diaglycerol kinase (DGK) deficient. In one embodiment, the cell is a T cell and the T cell is Ikaros deficient. In one embodiment, the cell is a T cell and the T cell is both DGK and Ikaros deficient.

[0874] In one embodiment, the method includes administering a cell expressing the fusion protein comprising a CAR molecule, as described herein, in combination with an agent which enhances the activity of a CAR-expressing cell, wherein the agent is a cytokine, e.g., IL-7, IL-15, IL-18, IL-21, or a combination thereof. The cytokine can be delivered in combination with, e.g., simultaneously or shortly after, administration of the CAR-expressing cell. Alternatively, the cytokine can be delivered after a prolonged period of time after administration of the CAR-expressing cell, e.g., after assessment of the subject's response to the CAR-expressing cell. In one embodiment the cytokine is administered to the subject simultaneously (e.g., administered on the same day) with or shortly after administration (e.g., administered 1 day, 2 days, 3 days, 4 days, 5 days, 6 days, or 7 days after administration) of the cell or population of cells of any of claims 61-80. In other embodiments, the cytokine is administered to the subject after a prolonged period of time (e.g., e.g., at least 2 weeks, 3 weeks, 4 weeks, 6 weeks, 8 weeks, 10 weeks, or more) after administration of the cell or population of cells of any of claims 61-80, or after assessment of the subject's response to the cell.

[0875] In other embodiments, the cells expressing a fusion protein comprising a CAR molecule are administered in combination with an agent that ameliorates one or more side effects associated with administration of a cell expressing a CAR molecule. Side effects associated with the CAR-expressing cell can be chosen from cytokine release syndrome (CRS) or hemophagocytic lymphohistiocytosis (HLH).

[0876] In embodiments of any of the aforeseaid methods or uses, the cells expressing the CAR molecule are administered in combination with an agent that treats the disease associated with expression of the tumor antigen, e.g., any of the second or third therapies disclosed herein. Additional exemplary combinations include one or more of the following.

[0877] In another embodiment, the cell expressing the CAR molecule, e.g., as described herein, can be administered in combination with another agent, e.g., a kinase inhibitor and/or checkpoint inhibitor described herein. In an embodiment, a cell expressing the CAR molecule can further express another agent, e.g., an agent which enhances the activity of a CAR-expressing cell.

[0878] For example, in one embodiment, the agent that enhances the activity of a CAR-expressing cell can be an agent which inhibits an inhibitory molecule (e.g., an immune inhibitor molecule). Examples of inhibitory molecules include PD1, PD-L1, CTLA-4, TIM-3, CEACAM (e.g., CEACAM-1, CEACAM-3 and/or CEACAM-5), LAG-3, VISTA, BTLA, TIGIT, LAIR1, CD160, 2B4 and TGFR beta.

[0879] In one embodiment, the agent that inhibits the inhibitory molecule is an inhibitory nucleic acid is a dsRNA, a siRNA, or a shRNA. In embodiments, the inhibitory nucleic acid is linked to the nucleic acid that encodes a component of the CAR molecule. For example, the inhibitory molecule can be expressed on the CAR-expressing cell.

[0880] In another embodiment, the agent which inhibits an inhibitory molecule, e.g., is a molecule described herein, e.g., an agent that comprises a first polypeptide, e.g., an inhibitory molecule, associated with a second polypeptide that provides a positive signal to the cell, e.g., an intracellular signaling domain described herein. In one embodiment, the agent comprises a first polypeptide, e.g., of an inhibitory molecule such as PD-1, PD-L1, CTLA-4, TIM-3, CEACAM (e.g., CEACAM-1, CEACAM-3 and/or CEACAM-5), LAG-3, VISTA, BTLA, TIGIT, LAIR1, CD160, 2B4 or TGFR beta, or a fragment of any of these (e.g., at least a portion of the extracellular domain of any of these), and a second polypeptide which is an intracellular signaling domain described herein (e.g., comprising a costimulatory domain (e.g., 41BB, CD27 or CD28, e.g., as described herein) and/or a primary signaling domain (e.g., a CD3 zeta signaling domain described herein). In one embodiment, the agent comprises a first polypeptide of PD1 or a fragment thereof (e.g., at least a portion of the extracellular domain of PD1), and a second polypeptide of an intracellular signaling domain described herein (e.g., a CD28 signaling domain described herein and/or a CD3 zeta signaling domain described herein).

[0881] In one embodiment, the cell of the present invention, e.g., T cell or NK cell, is administered to a subject that has received a previous stem cell transplantation, e.g., autologous stem cell transplantation.

[0882] In one embodiment, the cell of the present invention, e.g., T cell or NK cells, is administered to a subject that has received a previous dose of melphalan.

[0883] In one embodiment, the cell expressing a fusion protein comprising a CAR molecule, e.g., a CAR molecule described herein, is administered in combination with an agent that increases the efficacy of a cell expressing a CAR molecule, e.g., an agent described herein.

[0884] In one embodiment, the cells expressing a fusion protein comprising a CAR molecule, e.g., a CAR molecule described herein, are administered in combination with a low, immune enhancing dose of an mTOR inhibitor. While not wishing to be bound by theory, it is believed that treatment with a low, immune enhancing, dose (e.g., a dose that is insufficient to completely suppress the immune system but sufficient to improve immune function) is accompanied by a decrease in PD-1 positive T cells or an increase in PD-1 negative cells. PD-1 positive T cells, but not PD-1 negative T cells, can be exhausted by engagement with cells which express a PD-1 ligand, e.g., PD-L1 or PD-L2.

[0885] In an embodiment this approach can be used to optimize the performance of CAR cells described herein in the subject. While not wishing to be bound by theory, it is believed that, in an embodiment, the performance of endogenous, non-modified immune effector cells, e.g., T cells or NK cells, is improved.

[0886] While not wishing to be bound by theory, it is believed that, in an embodiment, the performance of a target antigen CAR-expressing cell is improved. In other embodiments, cells, e.g., T cells or NK cells, which have, or will be engineered to express a CAR, can be treated ex vivo by contact with an amount of an mTOR inhibitor that increases the number of PD1 negative immune effector cells, e.g., T cells or increases the ratio of PD1 negative immune effector cells, e.g., T cells/PD1 positive immune effector cells, e.g., T cells.

[0887] In an embodiment, administration of a low, immune enhancing, dose of an mTOR inhibitor, e.g., an allosteric inhibitor, e.g., RAD001, or a catalytic inhibitor, is initiated prior to administration of an CAR expressing cell described herein, e.g., T cells or NK cells. In an embodiment, the CAR cells are administered after a sufficient time, or sufficient dosing, of an mTOR inhibitor, such that the level of PD1 negative immune effector cells, e.g., T cells or NK cells, or the ratio of PD1 negative immune effector cells, e.g., T cells/PD1 positive immune effector cells, e.g., T cells, has been, at least transiently, increased.

[0888] In an embodiment, the cell, e.g., T cell or NK cell, to be engineered to express a CAR, is harvested after a sufficient time, or after sufficient dosing of the low, immune enhancing, dose of an mTOR inhibitor, such that the level of PD1 negative immune effector cells, e.g., T cells, or the ratio of PD1 negative immune effector cells, e.g., T cells/PD1 positive immune effector cells, e.g., T cells, in the subject or harvested from the subject has been, at least transiently, increased.

[0889] In one embodiment, the cell expressing a fusion protein comprising a CAR molecule, e.g., a CAR molecule described herein, is administered in combination with an agent that ameliorates one or more side effect associated with administration of a cell expressing a CAR molecule, e.g., an agent described herein.

[0890] In one embodiment, the cell expressing a fusion protein comprising a CAR molecule, e.g., a CAR molecule described herein, is administered in combination with an agent that treats the disease associated with a cancer associated antigen as described herein, e.g., an agent described herein.

[0891] In one embodiment, a cell expressing two or more fusion proteins comprising CAR molecules, e.g., as described herein, is administered to a subject in need thereof to treat cancer. In one embodiment, a population of cells including a fusion protein comprising a CAR expressing cell, e.g., as described herein, is administered to a subject in need thereof to treat cancer.

[0892] In one embodiment, the cell expressing a fusion protein comprising a CAR molecule, e.g., a CAR molecule described herein, is administered at a dose and/or dosing schedule described herein.

[0893] In one embodiment, the fusion protein comprising a CAR molecule is introduced into immune effector cells (e.g., T cells, NK cells), e.g., using in vitro transcription, and the subject (e.g., human) receives an initial administration of cells comprising a fusion protein comprising a CAR molecule, and one or more subsequent administrations of cells comprising a fusion protein comprising a CAR molecule, wherein the one or more subsequent administrations are administered less than 15 days, e.g., 14, 13, 12, 11, 10, 9, 8, 7, 6, 5, 4, 3, or 2 days after the previous administration. In one embodiment, more than one administration of cells comprising a fusion protein comprising a CAR molecule are administered to the subject (e.g., human) per week, e.g., 2, 3, or 4 administrations of cells comprising a fusion protein comprising a CAR molecule are administered per week. In one embodiment, the subject (e.g., human subject) receives more than one administration of cells comprising a fusion protein comprising a CAR molecule per week (e.g., 2, 3 or 4 administrations per week) (also referred to herein as a cycle), followed by a week of no administration of cells comprising a fusion protein comprising a CAR molecule, and then one or more additional administration of cells comprising a CAR molecule (e.g., more than one administration of the cells comprising a CAR molecule per week) is administered to the subject. In another embodiment, the subject (e.g., human subject) receives more than one cycle of cells comprising a fusion protein comprising a CAR molecule, and the time between each cycle is less than 10, 9, 8, 7, 6, 5, 4, or 3 days. In one embodiment, the cells comprising a fusion protein comprising a CAR molecule are administered every other day for 3 administrations per week. In one embodiment, the cells comprising a fusion protein comprising a CAR molecule are administered for at least two, three, four, five, six, seven, eight or more weeks.

[0894] In one embodiment, the cells expressing a fusion protein comprising a CAR molecule, e.g., a CAR molecule described herein, are administered as a first line treatment for the disease, e.g., the cancer, e.g., the cancer described herein. In another embodiment, the cells expressing a fusion protein comprising a CAR molecule, e.g., a CAR molecule described herein, are administered as a second, third, fourth line treatment for the disease, e.g., the cancer, e.g., the cancer described herein.

[0895] In one embodiment, a population of cells described herein is administered.

[0896] In another aspect, the invention pertains to a cell expressing a fusion protein comprising a CAR molecule described herein for use as a medicament in combination with a kinase inhibitor and/or a checkpoint inhibitor as described herein. In another aspect, the invention pertains to a kinase inhibitor and/or a checkpoint inhibitor described herein for use as a medicament in combination with a cell expressing a CAR molecule described herein.

[0897] In another aspect, the invention pertains to a cell expressing a fusion protein comprising a CAR molecule described herein for use in combination with a cytokine, e.g., IL-7, IL-15 and/or IL-21 as described herein, in the treatment of a disease expressing a tumor antigen targeted by the CAR. In another aspect, the invention pertains to a cytokine described herein for use in combination with a cell expressing a fusion protein comprising a CAR molecule described herein, in the treatment of a disease expressing a tumor antigen targeted by the CAR.

[0898] In another aspect, the invention pertains to a cell expressing a fusion protein comprising a CAR molecule described herein for use in combination with a kinase inhibitor and/or a checkpoint inhibitor as described herein, in the treatment of a disease expressing a tumor antigen targeted by the CAR. In another aspect, the invention pertains to a kinase inhibitor and/or a checkpoint inhibitor described herein for use in combination with a cell expressing a fusion protein comprising a CAR molecule described herein, in the treatment of a disease expressing a tumor antigen targeted by the CAR.

[0899] In another aspect, the present disclosure provides a method comprising administering a fusion protein comprising a CAR molecule, e.g., a CAR molecule described herein, or a cell comprising a nucleic acid encoding a fusion protein comprising a CAR molecule, e.g., a CAR molecule described herein. In one embodiment, the subject has a disorder described herein, e.g., the subject has cancer, e.g., the subject has a cancer and has tumor-supporting cells which express a tumor-supporting antigen described herein. In one embodiment, the subject is a human.

[0900] In one embodiment of the methods or uses described herein, the fusion protein comprising CAR molecule is administered in combination with another agent. In one embodiment, the agent can be a kinase inhibitor, e.g., a CDK4/6 inhibitor, a BTK inhibitor, an mTOR inhibitor, a MNK inhibitor, or a dual PI3K/mTOR inhibitor, and combinations thereof. In one embodiment, the kinase inhibitor is a CDK4 inhibitor, e.g., a CDK4 inhibitor described herein, e.g., a CD4/6 inhibitor, such as, e.g., 6-Acetyl-8-cyclopentyl-5-methyl-2-(5-piperazin-1-yl-pyridin-2-ylamino)-8H-pyrido[2,3-d]pyrimidin-7-one, hydrochloride (also referred to as palbociclib or PD0332991). In one embodiment, the kinase inhibitor is a BTK inhibitor, e.g., a BTK inhibitor described herein, such as, e.g., ibrutinib. In one embodiment, the kinase inhibitor is an mTOR inhibitor, e.g., an mTOR inhibitor described herein, such as, e.g., rapamycin, a rapamycin analog, OSI-027. The mTOR inhibitor can be, e.g., an mTORC1 inhibitor and/or an mTORC2 inhibitor, e.g., an mTORC1 inhibitor and/or mTORC2 inhibitor described herein. In one embodiment, the kinase inhibitor is a MNK inhibitor, e.g., a MNK inhibitor described herein, such as, e.g., 4-amino-5-(4-fluoroanilino)-pyrazolo[3,4-d] pyrimidine. The MNK inhibitor can be, e.g., a MNK1a, MNK1b, MNK2a and/or MNK2b inhibitor. The dual PI3K/mTOR inhibitor can be, e.g., PF-04695102.

[0901] In one embodiment of the methods or uses described herein, the kinase inhibitor is a CDK4 inhibitor selected from aloisine A; flavopiridol or HMR-1275, 2-(2-chlorophenyl)-5,7-dihydroxy-8-[(3S,4R)-3-hydroxy-1-methyl-4-piperidinyl]-4-chromenone; crizotinib (PF-02341066; 2-(2-Chlorophenyl)-5,7-dihydroxy-8-[(2R,3S)-2-(hydroxymethyl)-1-methyl-3-pyrrolidinyl]-4H-1-benzopyran-4-one, hydrochloride (P276-00); 1-methyl-5-[[2-[5-(trifluoromethyl)-1H-imidazol-2-yl]-4-pyridinyl]oxy]-N-[4-(trifluoromethyl)phenyl]-1H-benzimidazol-2-amine (RAF265); indisulam (E7070); roscovitine (CYC202); palbociclib (PD0332991); dinaciclib (SCH727965); N-[5-[[(5-tert-butyloxazol-2-yl)methyl]thio]thiazol-2-yl]piperidine-4-carboxamide (BMS 387032); 4-[[9-chloro-7-(2,6-difluorophenyl)-5H-pyrimido[5,4-d][2]benzazepin-2-yl]amino]-benzoic acid (MLN8054); 5-[3-(4,6-difluoro-1H-benzimidazol-2-yl)-1H-indazol-5-yl]-N-ethyl-4-methyl-3-pyridinemethanamine (AG-024322); 4-(2,6-dichlorobenzoylamino)-1H-pyrazole-3-carboxylic acid N-(piperidin-4-yl)amide (AT7519); 4-[2-methyl-1-(1-methylethyl)-1H-imidazol-5-yl]-N-[4-(methylsulfonyl)phenyl]-2-pyrimidinamine (AZD5438); and XL281 (BMS908662).

[0902] In one embodiment of the methods or uses described herein, the kinase inhibitor is a CDK4 inhibitor, e.g., palbociclib (PD0332991), and the palbociclib is administered at a dose of about 50 mg, 60 mg, 70 mg, 75 mg, 80 mg, 90 mg, 100 mg, 105 mg, 110 mg, 115 mg, 120 mg, 125 mg, 130 mg, 135 mg (e.g., 75 mg, 100 mg or 125 mg) daily for a period of time, e.g., daily for 14-21 days of a 28 day cycle, or daily for 7-12 days of a 21 day cycle. In one embodiment, 1, 2, 3, 4, 5, 6, 7, 8, 9, 10, 11, 12 or more cycles of palbociclib are administered.

[0903] In one embodiment of the methods or uses described herein, the kinase inhibitor is a BTK inhibitor selected from ibrutinib (PCI-32765); GDC-0834; RN-486; CGI-560; CGI-1764; HM-71224; CC-292; ONO-4059; CNX-774; and LFM-A13. In one embodiment, the BTK inhibitor does not reduce or inhibit the kinase activity of interleukin-2-inducible kinase (ITK), and is selected from GDC-0834; RN-486; CGI-560; CGI-1764; HM-71224; CC-292; ONO-4059; CNX-774; and LFM-A13.

[0904] In one embodiment of the methods or uses described herein, the kinase inhibitor is a BTK inhibitor, e.g., ibrutinib (PCI-32765), and the ibrutinib is administered at a dose of about 250 mg, 300 mg, 350 mg, 400 mg, 420 mg, 440 mg, 460 mg, 480 mg, 500 mg, 520 mg, 540 mg, 560 mg, 580 mg, 600 mg (e.g., 250 mg, 420 mg or 560 mg) daily for a period of time, e.g., daily for 21 day cycle, or daily for 28 day cycle. In one embodiment, 1, 2, 3, 4, 5, 6, 7, 8, 9, 10, 11, 12 or more cycles of ibrutinib are administered.

[0905] In one embodiment of the methods or uses described herein, the kinase inhibitor is a BTK inhibitor that does not inhibit the kinase activity of ITK, e.g., RN-486, and RN-486 is administered at a dose of about 100 mg, 110 mg, 120 mg, 130 mg, 140 mg, 150 mg, 160 mg, 170 mg, 180 mg, 190 mg, 200 mg, 210 mg, 220 mg, 230 mg, 240 mg, 250 mg (e.g., 150 mg, 200 mg or 250 mg) daily for a period of time, e.g., daily a 28 day cycle. In one embodiment, 1, 2, 3, 4, 5, 6, 7, or more cycles of RN-486 are administered.

[0906] In one embodiment of the methods or uses described herein, the kinase inhibitor is an mTOR inhibitor selected from temsirolimus; ridaforolimus (1R,2R,4S)-4-[(2R)-2 [(1R,9S,12S,15R,16E,18R,19R,21R, 23S,24E,26E,28Z,30S,32S,35R)-1,18-dihydroxy-19,30-dimethoxy-15,17,21,23, 29,35-hexamethyl-2,3,10,14,20-pentaoxo-11,36-dioxa-4-azatricyclo[30.3.1.0^{4,9}] hexatriaconta-16,24,26,28-tetraen-12-yl]propyl]-2-methoxycyclohexyl dimethylphosphinate, also known as AP23573 and MK8669; everolimus (RAD001); rapamycin (AY22989); simapimod; (5-{2,4-bis[(3S)-3-methylmorpholin-4-yl]pyrido[2,3-d]pyrimidin-7-yl}-2-methoxyphenyl)methanol (AZD8055); 2-amino-8-[trans-4-(2-hydroxyethoxy)cyclohexyl]-6-(6-methoxy-3-pyridinyl)-4-methyl-pyrido[2,3-d]pyrimidin-7(8H)-one (PF04691502); and M-[1,4-dioxo-4-[[4-(4-oxo-8-phenyl-4H-1-benzopyran-2-yl)morpholinium-4-yl]methoxy]butyl]-L-arginylglycyl-L-α-aspartylL-serine- (SEQ ID NO: 982), inner salt (SF1126); and XL765.

[0907] In one embodiment of the methods or uses described herein, the kinase inhibitor is an mTOR inhibitor, e.g., rapamycin, and the rapamycin is administered at a dose of about 3 mg, 4 mg, 5 mg, 6 mg, 7 mg, 8 mg, 9 mg, 10 mg (e.g., 6 mg) daily for a period of time, e.g., daily for 21 day cycle, or daily for 28 day cycle. In one embodiment, 1, 2, 3, 4, 5, 6, 7, 8, 9, 10, 11, 12 or more cycles of rapamycin are administered. In one embodiment, the kinase inhibitor is an mTOR inhibitor, e.g., everolimus and the everolimus is administered at a dose of about 2 mg, 2.5 mg, 3 mg, 4 mg, 5 mg, 6 mg, 7 mg, 8 mg, 9 mg, 10 mg, 11 mg, 12 mg, 13 mg, 14 mg, 15 mg (e.g., 10 mg) daily for a period of time, e.g., daily for 28 day cycle. In one embodiment, 1, 2, 3, 4, 5, 6, 7, 8, 9, 10, 11, 12 or more cycles of everolimus are administered.

[0908] In one embodiment of the methods or uses described herein, the kinase inhibitor is an MNK inhibitor selected from CGP052088; 4-amino-3-(p-fluorophenylamino)-pyrazolo pyrimidine (CGP57380); cercosporamide; ETC-1780445-2; and 4-amino-5-(4-fluoroanilino)-pyrazolo pyrimidine.

[0909] In one embodiment of the methods or uses described herein, the kinase inhibitor is a dual phosphatidylinositol 3-kinase (PI3K) and mTOR inhibitor selected from 2-Amino-8-[trans-4-(2-hydroxyethoxy)cyclohexyl]-6-(6-methoxy-3-pyridinyl)-4-methyl-pyrido[2,3-d]pyrimidin-7(8H)-one (PF-04691502); N-[4-[[4-(Dimethylamino)-1-piperidinyl]carbonyl]phenyl]-N′-[4-(4,6-di-4-morpholinyl-1,3,5-triazin-2-yl)phenyl]urea (PF-05212384, PKI-587); 2-Methyl-2-{14-[3-methyl-2-oxo-8-(quinolin-3-yl)-2,3-dihydro-1H-imidazo[4,5-c]quinolin-1-yl]phenyl}propanenitrile (BEZ-235); apitolisib (GDC-0980, RG7422); 2,4-Difluoro-N-{2-(methyloxy)-5-[4-(4-pyridazinyl)-6-quinolinyl]-3-pyridinyl}benzenesulfonamide (GSK2126458); 8-(6-methoxypyridin-3-yl)-3-methyl-1-(4-(piperazin-1-yl)-3-(trifluoromethyl)phenyl)-1H-imidazo[4,5-c]quinolin-2(3H)-one Maleic acid (NVP-BGT226); 3-[4-(4-Morpholinylpyrido[3′,2′:4,5]furo[3,2-d]pyrimidin-2-yl]phenol (PI-103); 5-(9-isopropyl-8-methyl-2-morpholino-9H-purin-6-yl)pyrimidin-2-amine (VS-5584, SB2343); and N-[2-[(3,5-Dimethoxyphenyl)amino]quinoxalin-3-yl]-4-[(4-methyl-3-methoxyphenyl)carbonyl]aminophenylsulfonamide (XL765).

[0910] In one embodiment of the methods or uses described herein, a cell comprising a fusion protein described herein is administered to a subject in combination with a protein tyrosine phosphatase inhibitor, e.g., a protein tyrosine phosphatase inhibitor described herein. In one embodiment, the protein tyrosine phosphatase inhibitor is an SHP-1 inhibitor, e.g., an SHP-1 inhibitor described herein, such as, e.g., sodium stibogluconate. In one embodiment, the protein tyrosine phosphatase inhibitor is an SHP-2 inhibitor.

[0911] In one embodiment of the methods or uses described herein, a cell comprising a fusion protein described herein is administered in combination with another agent, and the agent is a cytokine. The cytokine can be, e.g., IL-7, IL-15, IL-21, or a combination thereof. In another embodiment, a cell comprising a fusion protein described herein is administered in combination with a checkpoint inhibitor, e.g., a checkpoint inhibitor described herein. For example, in one embodiment, the check point inhibitor inhibits an inhibitory molecule selected from PD-1, PD-L1, CTLA-4, TIM-3, CEACAM (e.g., CEACAM-1, CEACAM-3 and/or CEACAM-5), LAG-3, VISTA, BTLA, TIGIT, LAIR1, CD160, 2B4 and TGFR beta.

[0912] In one aspect, the fusion protein described herein can be used to eradicate a normal cell that express a tumor antigen as described herein, thereby applicable for use as a cellular conditioning therapy prior to cell transplantation. In one aspect, the normal cell that expresses a tumor antigen as described herein is a normal stem cell and the cell transplantation is a stem cell transplantation.

[0913] Methods of Treatment of Autoantibody or Alloantibody Conditions

[0914] The present invention includes methods for treating autoantibody or alloantibody diseases or conditions in a subject by targeting B cells, including the autoantibody or alloantibody producing B cells, with anti-B cell modified T cells. In one embodiment, after B cell depletion by the modified T cells, or following the onset of an adverse reaction to the modified T cells, the modified T cells are then selectively ablated in the subject by activating a suicide gene that has been inserted into the modified T cells.

[0915] In one aspect, the invention includes a method for treating an autoantibody or alloantibody disease or condition in a subject in need thereof comprising administering an effective amount of a pharmaceutical composition comprising a modified T cell to the subject. The modified T cell comprises a nucleic acid comprising a suicide gene and a nucleic acid encoding a chimeric antigen receptor comprising an anti-B cell binding domain, a transmembrane domain, a costimulatory domain and an intracellular signaling domain.

[0916] In one embodiment, the method further comprises inducing expression of the suicide gene to produce a suicide gene product that induces cell death of the modified T cell. In one such embodiment, administering an inducing agent induces expression of the suicide gene. In another embodiment, inducing expression of the suicide gene occurs after the modified T cell exerts cytotoxic function against B cells or after an onset of an adverse reaction in the subject to the modified T cell.

[0917] In another embodiment, the method further comprises activating a suicide gene product of the suicide gene to induce cell death of the modified T cell. In one such embodiment, administering an activating agent to promote dimerization of the suicide gene product to activate the suicide gene product. In another embodiment, activating the suicide gene product occurs after the modified T cell exerts cytotoxic function against B cells or after an onset of an adverse reaction in the subject to the modified T cell or after therapeutic effect is achieved.

[0918] In yet another embodiment, the method further comprises inhibiting expression of the suicide gene to inhibit cell death of the modified T cell. In one such embodiment, administering an inhibiting agent inhibits expression of the suicide gene. In another embodiment, administering the inhibiting agent occurs concurrently with administration of the modified T cell and continues as the modified T cell exerts cytotoxic function against B cells and may be ceased after an onset of an adverse reaction in the subject to the modified T cell.

[0919] In still another embodiment, the method comprises repressing activation of a suicide gene product of the suicide gene to repress cell death of the modified T cell. In one such embodiment, administering a solubilizing agent prevents dimerization of the suicide gene product to prevent activation the suicide gene product. In another embodiment, administering the solubilizing agent occurs concurrently with administration of the modified T cell and continues as the modified T cell exerts cytotoxic function against B cells and may be ceased after an onset of an adverse reaction in the subject to the modified T cell or after therapeutic effect is achieved.

[0920] In yet another embodiment, the method further comprises administering a solubilizing agent to prevent dimerization of the CAR, wherein the CAR is linked to a dimerization domain, such as a dimerization domain of FKBP or similar molecule. In such an embodiment, the CAR molecules spontaneously aggregate in the cytoplasm or other internal location, thereby preventing presentation of the CAR molecules on the surface of the modified T cell. In another embodiment, administering the solubilizing agent occurs concurrently with administration of the modified T cell and continues as the modified T cell exerts cytotoxic function against B cells and may be ceased after an onset of an adverse reaction in the subject to the modified T cell or after therapeutic effect is achieved.

[0921] The modified T cells can be administered to an animal, preferably a mammal, even more preferably a human, to suppress an immune reaction, such as those common to an autoimmune disease or condition or an alloantibody disease or condition.

[0922] In addition, the modified T cells of the present invention can be used for the treatment of any condition in which a diminished or otherwise inhibited immune response, especially a cell-mediated immune response, is desired in order to treat or alleviate the disease. In one aspect, the invention includes treating a condition, such as an autoantibody or alloantibody disease, in a subject, comprising administering to the subject a therapeutically effective amount of a pharmaceutical composition comprising the modified T cell described herein.

[0923] Examples of autoantibody diseases or conditions include, but are not limited to, bullous pemphigoid, epidermolysis bullosa acquisita, p200 pemphigoid, linear IgA bullous dermatosis, other pemphigoid group diseases, dermatitis herpetiformis, celiac disease, myasthenia gravis, Goodpasture's syndrome, granulomatosis with polyangiitis and other ANCA+ vasculitidies, autoimmune limbic encephalitis, anti-N-methyl-D-aspartate receptor encephalitis, neuromyelitis optica, autoimmune hemolytic anemia, autoantibody-associated end-organ damage in lupus and other connective tissue diseases (due to anti-dsDNA, anti-Ro, and other autoantibodies), Graves' and Hashimoto's thyroiditis, anti-insulin antibodies in diabetes, anti-insulin receptor antibodies in autoimmune hypoglycemia, cryoglobulinemia, rheumatoid arthritis, multiple sclerosis, Sjogren's syndrome, dermatomyositis, anti-Fc-epsilon receptor antibodies in chronic idiopathic urticaria, anti-folate receptor antibodies, anti-endothelial receptor or anti-adrenergic receptor antibodies in pulmonary arterial hypertension, refractory hypertension, dilated cadiomyopathy, and an autoinflammatory syndrome.

[0924] An example of alloantibody disease or condition, includes, but are not limited to, an immune reaction resulting from organ transplant, blood transfusion and production of donor-specific HLA and/or b2-microglobulin antibodies, pregnancy sensitization against blood group or Rh antigens or protein replacement therapy, such as with Factor VIII, α-L-iduronidase, type VH collagen, etc. including, but not limited to, the replacement proteins listed in Gorzelany, et al. (Sci. Transl. Med., 5(178):178s10, 2013).

[0925] In one embodiment, the disease or condition is pemphigus. Longitudinal analysis of B cell repertoires in pemphigus patients during treatment has shown that pemphigus patients relapse with the same anti-Dsg B cell clones observed in active disease. Collectively these data indicate that a single, but truly complete, B cell depletion eliminating all anti-Dsg B cell clones by targeting a pan-B cell marker, such as CD20 or alternatively CD19, may be curative in pemphigus patients. The pathologic clones will be eliminated, a healthy B cell repertoire will reform, and another rare break in tolerance is unlikely to recur.

[0926] By analogy, this same approach should also be effective for any B-cell or antibody-mediated disease; for example diseases caused by alloantibodies resulting from blood transfusion or sensitization during pregnancy, donor-specific HLA alloantibodies that complicate organ transplant, and alloantibodies resulting from protein replacement therapy for genetic diseases. Even if alloantibodies recur due to re-exposure to alloantigen, intermittent re-treatment to completely, but transiently, eliminate B cells (and consequently alloantibodies) will be beneficial in these diseases.

[0927] Pharmaceutical Compositions

[0928] Pharmaceutical compositions of the present disclosure may comprise any fusion protein, nucleic acid encoding such a fusion protein, as described herein, and one or more pharmaceutically or physiologically acceptable carriers, diluents or excipients. Such compositions may comprise buffers such as neutral buffered saline, phosphate buffered saline and the like; carbohydrates such as glucose, mannose, sucrose or dextrans, mannitol; proteins; polypeptides or amino acids such as glycine; antioxidants; chelating agents such as EDTA or glutathione; adjuvants (e.g., aluminum hydroxide); and preservatives. Compositions of the present disclosure are in one aspect formulated for intravenous administration.

[0929] Pharmaceutical compositions of the present disclosure may be administered in a manner appropriate to the disease to be treated (or prevented). The quantity and frequency of administration will be determined by such factors as the condition of the patient, and the type and severity of the patient's disease, although appropriate dosages may be determined by clinical trials.

[0930] In one aspect, the invention includes a pharmaceutical composition formulated for use in the method as described herein, the composition comprising a modified T cell comprising a nucleic acid encoding a suicide gene and a nucleic acid encoding a chimeric antigen receptor comprising an anti-B cell binding domain, a transmembrane domain, a costimulatory domain and an intracellular signaling domain.

[0931] In another aspect, the invention includes a pharmaceutical composition formulated for use in the method as described herein, the composition comprising a modified T cell comprising a nucleic acid encoding a dimerization domain and a chimeric antigen receptor (CAR) comprising an anti-B cell binding domain, a transmembrane domain, a costimulatory domain and an intracellular signaling domain

[0932] In one embodiment, the pharmaceutical composition is substantially free of, e.g., there are no detectable levels of a contaminant, e.g., selected from the group consisting of endotoxin, mycoplasma, replication competent lentivirus (RCL), p24, VSV-G nucleic acid, HIV gag, residual anti-CD3/anti-CD28 coated beads, mouse antibodies, pooled human serum, bovine serum albumin, bovine serum, culture media components, vector packaging cell or plasmid components, a bacterium and a fungus. In one embodiment, the bacterium is at least one selected from the group consisting of Alcaligenes faecalis, Candida albicans, Escherichia coli, Haemophilus influenza, Neisseria meningitides, Pseudomonas aeruginosa, Staphylococcus aureus, Streptococcus pneumonia, and Streptococcus pyogenes group A.

[0933] When “an immunologically effective amount,” “an anti-tumor effective amount,” “a tumor-inhibiting effective amount,” or “therapeutic amount” is indicated, the precise amount of the compositions of the present disclosure to be administered can be determined by a physician with consideration of individual differences in age, weight, tumor size, extent of infection or metastasis, and condition of the patient (subject). It can generally be stated that a pharmaceutical composition comprising the immune effector cells (e.g., T cells, NK cells) described herein may be administered at a dosage of 10⁴ to 10⁹ cells/kg body weight, in some instances 10⁵ to 10⁶ cells/kg body weight, including all integer values within those ranges. T cell compositions may also be administered multiple times at these dosages. The cells can be administered by using infusion techniques that are commonly known in immunotherapy (see, e.g., Rosenberg et al., New Eng. J. of Med. 319:1676, 1988).

[0934] In certain aspects, it may be desired to administer activated immune effector cells (e.g., T cells, NK cells) to a subject and then subsequently redraw blood (or have an apheresis performed), activate immune effector cells (e.g., T cells, NK cells) therefrom according to the present invention, and reinfuse the patient with these activated and expanded immune effector cells (e.g., T cells, NK cells). This process can be carried out multiple times every few weeks. In certain aspects, immune effector cells (e.g., T cells, NK cells) can be activated from blood draws of from 10 cc to 400 cc. In certain aspects, immune effector cells (e.g., T cells, NK cells) are activated from blood draws of 20 cc, 30 cc, 40 cc, 50 cc, 60 cc, 70 cc, 80 cc, 90 cc, or 100 cc.

[0935] The administration of the subject compositions may be carried out in any convenient manner, including by aerosol inhalation, injection, ingestion, transfusion, implantation or transplantation. The compositions described herein may be administered to a patient transarterially, subcutaneously, intradermally, intratumorally, intranodally, intramedullary, intramuscularly, by intravenous (i.v.) injection, or intraperitoneally. In one aspect, the cell compositions of the present disclosure are administered to a patient by intradermal or subcutaneous injection. In one aspect, the cell compositions of the present disclosure are administered by i.v. injection. The compositions of immune effector cells (e.g., T cells, NK cells) may be injected directly into a tumor, lymph node, or site of infection.

[0936] In a particular exemplary aspect, subjects may undergo leukapheresis, wherein leukocytes are collected, enriched, or depleted ex vivo to select and/or isolate the cells of interest, e.g., T cells. These T cell isolates may be expanded by methods known in the art and treated such that one or more CAR constructs of the invention may be introduced, thereby creating a CAR T cell of the invention. Subjects in need thereof may subsequently undergo standard treatment with high dose chemotherapy followed by peripheral blood stem cell transplantation. In certain aspects, following or concurrent with the transplant, subjects receive an infusion of the expanded CAR T cells of the present invention. In an additional aspect, expanded cells are administered before or following surgery.

[0937] The dosage of the above treatments to be administered to a patient will vary with the precise nature of the condition being treated and the recipient of the treatment. The scaling of dosages for human administration can be performed according to art-accepted practices.

### EXAMPLES

### Example 1: Materials and Methods for Examples 1-13

[0938] Constructs

[0939] The following constructs shown in Table 22 were used in Examples 1-13.

[0940] Note that the invention encompasses both orientations of heavy and light chain.

TABLE 22
Sequences of various constructs (in bold is the signal peptide used; underlined are
the furin cleavage sites.)

| Construct | Protein Sequence | DNA sequence |
|---|---|---|
| ERₘᵤₜ_Furin_ | MALPVTALLLPLALLLHAARPR | atggccctccctgtcaccgccctgctgcttccgctggctcttctgctc |
| Flexi-12 | SSLALSLTADQMVSALLDAEPPI | cacgccgctcggccccggtcgtcgttggcactttccctgactgccg |
| | LYSEYDPTRPFSEASMMGLLTN | accagatggtgtccgcccttctggacgccgagcctccaattctgta |
| | LADRELVHMINWAKRVPGFVDL | ctcggagtacgatccgactcgcccgttctccgaagccagcatgat |
| | ALHDQVHLLECAWMEILMIGLV | gggcctgttgactaacctggcggaccgcgagttggtgcacatgatt |
| | WRSMEHPGKLLFAPNLLLDRNQ | aactgggctaagcgggtgccgggcttcgtggacctggccctgca |
| | GKCVEGGVEIFDMLLATSSRFR | cgaccaagtgcacctcctggaatgcgcctggatggaaatcctcat |
| | MMNLQGEEFVCLKSIILLNSGVY | gatcggcctcgtgtggagatccatggagcatcccggaaagctcct |
| | TFLSSTLKSLEEKDHIHRVLDKIT | gtttgcacccaacctcctgcttgatcgcaaccagggaaaatgcgt |
| | DTLIHLMAKAGLTLQQQHQRLA | ggaagggggtgtcgagattttcgacatgctgctcgccacctcttcc |
| | QLLLILSHIRHMSSKRMEHLYSM | cggttccggatgatgaatctgcagggagaagagttcgtgtgtctga |
| | KCKNVVPLSDLLLEMLDAHRLR | agtcaatcatcctgctgaactccggggtctataccttcctgagctcg |
| | TKRIWELKKDVYVVELDWYPDA | accctcaagtcactggaggaaaaagaccacatccatcgcgtgct |
| | PGEMVVLTCDTPEEDGITWTLD | cgataagatcaccgacacccttatccatctcatggcgaaggctgg |
| | QSSEVLGSGKTLTIQVKEFGDA | actgaccctgcaacagcagcaccagaggctggcccagttgctgc |
| | GQYTCHKGGEVLSHSLLLLHKK | tgattctgagccacatccggcacatgtcgtccaagaggatggaac |
| | EDGIWSTDILKDQKEPKNKTFLR | acctgtacagcatgaagtgcaagaacgtcgtgcctctgtccgatct |
| | CEAKNYSGRFTCWWLTTISTDL | gctcctggaaatgctggacgcgcacagactccgtactaaaaga |
| | TFSVKSSRGSSDPQGVTCGAAT | (SEQ ID NO: 49) |
| | LSAERVRGDNKEYEYSVECQED | |
| | SACPAAEESLPIEVMVDAVHKLK | |
| | YENYTSSFFIRDIIKPDPPKNLQL | |
| | KPLKNSRQVEVSWEYPDTWST | |
| | PHSYFSLTFCVQVQGKSKREKK | |
| | DRVFTDKTSATVICRKNASISVR | |
| | AQDRYYSSSWSEWASVPCSGG | |
| | GSGGGSGGGSRNLPVATPDPG | |
| | MFPCLHHSQNLLRAVSNMLQKA | |
| | RQTLEFYPCTSEEIDHEDITKDK | |
| | TSTVEACLPLELTKNESCLNSRE | |
| | TSFITNGSCLASRKTSFMMALCL | |
| | SSIYEDLKMYQVEFKTMNAKLL | |
| | MDPKRQIFLDQNMLAVIDELMQ | |
| | ALNFNSETVPQKSSLEEPDFYK | |
| | TKIKLCILLHAFRIRAVTIDRVMSY | |
| | LNAS (SEQ ID NO: 48) | |
| linker | GGGSGGGSGGGSRNLPV (SEQ | gtggtggcggtggaagcggcggtggcggaagcggcggtggcg |
| | ID NO: 52) | gcagcagaaacctccccgtgg (SEQ ID NO: 53) |
| FKBP L106P | GVQVETISPGDGRTFPKRGQTC | |
| | VVHYTGMLEDGKKVDSSRDRN | |
| | KPFKFMLGKQEVIRGWEEGVAQ | |
| | MSVGQRAKLTISPDYAYGATGH | |
| | PGIIPPHATLVFDVELLKPE (SEQ | |
| | ID NO: 56) | |
| DHFR | ISLIAALAVDYVIGMENAMPWNL | |
| R12Y/G27S/ | PADLAWFKRNTLNKPVIMGRHT | |
| Y100I | WESIGRPLPGRKNIILSSQPSTD | |
| | DRVTWVKSVDEAIAACGDVPEI | |
| | MVIGGGRVIEQFLPKAQKLYLTH | |
| | IDAEVEGDTHFPDYEPDDWESV | |
| | FSEFHDADAQNSHSYCFEILER | |
| | R (SEQ ID NO: 57) | |
| ER | RSSLALSLTADQMVSALLDAEP | |
| T371A_L384 | PILYSEYDPTRPFSEASMMGLLT | |
| M_M421G_N | NLADRELVHMINWAKRVPGFVD | |
| 519S_G521R_ | LALHDQVHLLECAWMEILMIGLV | |
| Y537S | WRSMEHPGKLLFAPNLLLDRNQ | |
| | GKCVEGGVEIFDMLLATSSRFR | |
| | MMNLQGEEFVCLKSIILLNSGVY | |
| | TFLSSTLKSLEEKDHIHRVLDKIT | |
| | DTLIHLMAKAGLTLQQQHQRLA | |
| | QLLLILSHIRHMSSKRMEHLYSM | |
| | KCKNVVPLSDLLLEMLDAHRL | |
| | (SEQ ID NO: 1119) | |
| CG#c43 | MALPVTALLLPLALLLHAARPG | atggccctccctgtcaccgccctgctgcttccgctggctcttctgctc |
| FKBPₘᵤₜ_HA_ | VQVETISPGDGRTFPKRGQTCV | cacgccgctcggcccggagtgcaggtggaaaccatctccccag |
| Furin_CAR19 | VHYTGMLEDGKKVDSSRDRNK | gagacgggcgcaccttccccaagcgcggccagacctgtgtggt |
| | PFKFMLGKQEVIRGWEEGVAQ | gcactacaccgggatgcttgaagatggaaagaaagtcgattcct |
| | MSVGQRAKLTISPDYAYGATGH | cccgggacagaaacaagccctttaagtttatgctaggcaagcag |
| | PGIIPPHATLVFDVELLKPEYPYD | gaggtgatccgaggctgggaagaaggggttgcccagatgagtg |
| | VPDYAFPVDRTKREIVMTQSPA | tgggtcagagagccaaactgactatatctccagattatgcctatgg |
| | TLSLSPGERATLSCRASQDISKY | tgccactgggcacccaggcatcatcccaccacatgccactctcgt |
| | LNWYQQKPGQAPRLLIYHTSRL | cttcgatgtggagcttctaaaaccggaatacccttatgatgttcctg |
| | HSGIPARFSGSGSGTDYTLTISS | attatgctttccccgtggatcgtactaaaagagaaattgtgatgacc |
| | LQPEDFAVYFCQQGNTLPYTFG | cagtcacccgccactcttagcctttcacccggtgagcgcgcaacc |
| | QGTKLEIKGGGGSGGGGSGGG | ctgtcttgcagagcctcccaagacatctcaaaataccttaattggta |
| | GSQVQLQESGPGLVKPSETLSL | tcaacagaagcccggacaggctcctcgccttctgatctaccacac |
| | TCTVSGVSLPDYGVSWIRQPPG | cagccggctccattctggaatccctgccaggttcagcggtagcgg |
| | KGLENGVIWGSETTYYSSSLKS | atctgggaccgactacaccctcactatcagctcactgcagccaga |
| | RVTISKDNSKNQVSLKLSSVTAA | ggacttcgctgtctatttctgtcagcaagggaacaccctgccctac |
| | DTAVYYCAKHYYYGGSYAMDY | acctttggacagggcaccaagctcgagattaaaggtggaggtgg |
| | WGQGTLVTVSSTTTPAPRPPTP | cagcggaggaggtgggtccggcggtggaggaagccaggtcca |
| | APTIASQPLSLRPEACRPAAGG | actccaagaaagcggaccgggtcttgtgaagccatcagaaactc |
| | AVHTRGLDFACDIYIWAPLAGTC | tttcactgacttgtactgtgagcggagtgtctctccccgattacgggg |
| | GVLLLSLVITLYCKRGRKKLLYIF | tgtcttggatcagacagccaccggggaagggtctggaatggattg |
| | KQPFMRPVQTTQEEDGCSCRF | gagtgatttggggctctgagactacttactactcttcatccctcaagt |
| | PEEEEGGCELRVKFSRSADAPA | cacgcgtcaccatctcaaaggacaactctaagaatcaggtgtca |
| | YKQGQNQLYNELNLGRREEYD | ctgaaactgtcatctgtgaccgcagccgacaccgccgtgtactatt |
| | VLDKRRGRDPEMGGKPRRKNP | gcgctaagcattactattatggcgggagctacgcaatggattactg |
| | QEGLYNELQKDKMAEAYSEIGM | gggacagggtactctggtcaccgtgtccagcaccactaccccag |
| | KGERRRGKGHDGLYQGLSTAT | caccgaggccacccaccccggctcctaccatcgcctcccagcct |
| | KDTYDALHMQALPPR (SEQ ID | ctgtccctgcgtccggaggcatgtagacccgcagctggtggggc |
| | NO: 59) | cgtgcatacccggggtcttgacttcgcctgcgatatctacatttggg |
| | | cccctctggctggtacttgcggggtcctgctgctttcactcgtgatca |
| | | ctctttactgtaagcgcggtcggaagaagctgctgtacatctttaag |
| | | caacccttcatgaggcctgtgcagactactcaagaggaggacgg |
| | | ctgttcatgccggttcccagaggaggaggaaggcggctgcgaa |
| | | ctgcgcgtgaaattcagccgcagcgcagatgctccagcctacaa |
| | | gcaggggcagaaccagctctacaacgaactcaatcttggtcgga |
| | | gagaggagtacgacgtgctggacaagcggagaggacgggac |
| | | ccagaaatgggcgggaagccgcgcagaaagaatccccaaga |
| | | gggcctgtacaacgagctccaaaaggataagatggcagaagc |
| | | ctatagcgagattggtatgaaaggggaacgcagaagaggcaa |
| | | aggccacgacggactgtaccagggactcagcaccgccaccaa |
| | | ggacacctatgacgctcttcacatgcaggccctgccgcctcgg |
| | | (SEQ ID NO: 60) |
| CG#c44 | MALPVTALLLPLALLLHAARPG | atggccctccctgtcaccgccctgctgcttccgctggctcttctgctc |
| FKBPₘᵤₜ_ | VQVETISPGDGRTFPKRGQTCV | cacgccgctcggcccggagtgcaggtggaaaccatctccccag |
| HA_Furinmut_ | VHYTGMLEDGKKVDSSRDRNK | gagacgggcgcaccttccccaagcgcggccagacctgtgtggt |
| CAR19 | PFKFMLGKQEVIRGWEEGVAQ | gcactacaccgggatgcttgaagatggaaagaaagtcgattcct |
| | MSVGQRAKLTISPDYAYGATGH | cccgggacagaaacaagccctttaagtttatgctaggcaagcag |
| | PGIIPPHATLVFDVELLKPEYPYD | gaggtgatccgaggctgggaagaaggggttgcccagatgagtg |
| | VPDYAFPVDATKREIVMTQSPA | tgggtcagagagccaaactgactatatctccagattatgcctatgg |
| | TLSLSPGERATLSCRASQDISKY | tgccactgggcacccaggcatcatcccaccacatgccactctcgt |
| | LNWYQQKPGQAPRLLIYHTSRL | cttcgatgtggagcttctaaaaccggaatacccttatgatgttcctg |
| | HSGIPARFSGSGSGTDYTLTISS | attatgctttccccgtggatgctactaaaagagaaattgtgatgacc |
| | LQPEDFAVYFCQQGNTLPYTFG | cagtcacccgccactcttagcctttcacccggtgagcgcgcaacc |
| | QGTKLEIKGGGGSGGGGSGGG | ctgtcttgcagagcctcccaagacatctcaaaataccttaattggta |
| | GSQVQLQESGPGLVKPSETLSL | tcaacagaagcccggacaggctcctcgccttctgatctaccacac |
| | TCTVSGVSLPDYGVSWIRQPPG | cagccggctccattctggaatccctgccaggttcagcggtagcgg |
| | KGLENGVIWGSETTYYSSSLKS | atctgggaccgactacaccctcactatcagctcactgcagccaga |
| | RVTISKDNSKNQVSLKLSSVTAA | ggacttcgctgtctatttctgtcagcaagggaacaccctgccctac |
| | DTAVYYCAKHYYYGGSYAMDY | acctttggacagggcaccaagctcgagattaaaggtggaggtgg |
| | WGQGTLVTVSSTTTPAPRPPTP | cagcggaggaggtgggtccggcggtggaggaagccaggtcca |
| | APTIASQPLSLRPEACRPAAGG | actccaagaaagcggaccgggtcttgtgaagccatcagaaactc |
| | AVHTRGLDFACDIYIWAPLAGTC | tttcactgacttgtactgtgagcggagtgtctctccccgattacgggg |
| | GVLLLSLVITLYCKRGRKKLLYIF | tgtcttggatcagacagccaccggggaagggtctggaatggattg |
| | KQPFMRPVQTTQEEDGCSCRF | gagtgatttggggctctgagactacttactactcttcatccctcaagt |
| | PEEEEGGCELRVKFSRSADAPA | cacgcgtcaccatctcaaaggacaactctaagaatcaggtgtca |
| | YKQGQNQLYNELNLGRREEYD | ctgaaactgtcatctgtgaccgcagccgacaccgccgtgtactatt |
| | VLDKRRGRDPEMGGKPRRKNP | gcgctaagcattactattatggcgggagctacgcaatggattactg |
| | QEGLYNELQKDKMAEAYSEIGM | gggacagggtactctggtcaccgtgtccagcaccactaccccag |
| | KGERRRGKGHDGLYQGLSTAT | caccgaggccacccaccccggctcctaccatcgcctcccagcct |
| | KDTYDALHMQALPPR (SEQ ID | ctgtccctgcgtccggaggcatgtagacccgcagctggtggggc |
| | NO: 61) | cgtgcatacccggggtcttgacttcgcctgcgatatctacatttggg |
| | | cccctctggctggtacttgcggggtcctgctgctttcactcgtgatca |
| | | ctctttactgtaagcgcggtcggaagaagctgctgtacatctttaag |
| | | caacccttcatgaggcctgtgcagactactcaagaggaggacgg |
| | | ctgttcatgccggttcccagaggaggaggaaggcggctgcgaa |
| | | ctgcgcgtgaaattcagccgcagcgcagatgctccagcctacaa |
| | | gcaggggcagaaccagctctacaacgaactcaatcttggtcgga |
| | | gagaggagtacgacgtgctggacaagcggagaggacgggac |
| | | ccagaaatgggcgggaagccgcgcagaaagaatccccaaga |
| | | gggcctgtacaacgagctccaaaaggataagatggcagaagc |
| | | ctatagcgagattggtatgaaaggggaacgcagaagaggcaa |
| | | aggccacgacggactgtaccagggactcagcaccgccaccaa |
| | | ggacacctatgacgctcttcacatgcaggccctgccgcctcgg |
| | | (SEQ ID NO: 62) |
| CG#c45 | MALPVTALLLPLALLLHAARPIS | atggccctccctgtcaccgccctgctgcttccgctggctcttctgctc |
| DHFRₘᵤₜ_HA_ | LIAALAVDYVIGMENAMPWNLPA | cacgccgctcggcccatctctctgattgccgctctggccgtggact |
| Furin_CAR19 | DLAWFKRNTLNKPVIMGRHTWE | acgtgatcgggatggaaaacgctatgccatggaatctgcccgcc |
| | SIGRPLPGRKNIILSSQPSTDDR | gatctggcttggttcaagaggaacaccctgaacaagccagtgat |
| | VTWVKSVDEAIAACGDVPEIMVI | catgggcagacacacttgggagtccattggccggcccctgcctg |
| | GGGRVIEQFLPKAQKLYLTHIDA | gacgcaagaacatcattctgagctcccagccctctaccgacgac |
| | EVEGDTHFPDYEPDDWESVFS | agggtgacatgggtgaaaagtgtggacgaagccattgccgcttg |
| | EFHDADAQNSHSYCFEILERRY | cggagatgtgcccgagatcatggtcatcggcggagggagagtg |
| | PYDVPDYAFPVDRTKREIVMTQ | atcgagcagttcctgcctaaggcccagaaactgtacctgactcac |
| | SPATLSLSPGERATLSCRASQDI | attgacgctgaggtggaaggggacacccattttcctgattatgagc |
| | SKYLNWYQQKPGQAPRLLIYHT | cagacgattgggaaagcgtgttctccgagtttcacgacgccgatg |
| | SRLHSGIPARFSGSGSGTDYTL | ctcagaactctcatagttattgctttgagatcctggaaaggagatac |
| | TISSLQPEDFAVYFCQQGNTLPY | ccttatgatgttcctgattatgctttccccgtggatcgtactaaaaga |
| | TFGQGTKLEIKGGGGSGGGGS | gaaattgtgatgacccagtcacccgccactcttagcctttcacccg |
| | GGGGSQVQLQESGPGLVKPSE | gtgagcgcgcaaccctgtcttgcagagcctcccaagacatctca |
| | TLSLTCTVSGVSLPDYGVSWIR | aaataccttaattggtatcaacagaagcccggacaggctcctcgc |
| | QPPGKGLEWIGVIWGSETTYYS | cttctgatctaccacaccagccggctccattctggaatccctgcca |
| | SSLKSRVTISKDNSKNQVSLKLS | ggttcagcggtagcggatctgggaccgactacaccctcactatca |
| | SVTAADTAVYYCAKHYYYGGSY | gctcactgcagccagaggacttcgctgtctatttctgtcagcaagg |
| | AMDYWGQGTLVTVSSTTTPAP | gaacaccctgccctacacctttggacagggcaccaagctcgag |
| | RPPTPAPTIASQPLSLRPEACRP | attaaaggtggaggtggcagcggaggaggtgggtccggcggtg |
| | AAGGAVHTRGLDFACDIYIWAPL | gaggaagccaggtccaactccaagaaagcggaccgggtcttgt |
| | AGTCGVLLLSLVITLYCKRGRKK | gaagccatcagaaactctttcactgacttgtactgtgagcggagtg |
| | LLYIFKQPFMRPVQTTQEEDGC | tctctccccgattacggggtgtcttggatcagacagccaccgggg |
| | SCRFPEEEEGGCELRVKFSRSA | aagggtctggaatggattggagtgatttggggctctgagactactt |
| | DAPAYKQGQNQLYNELNLGRR | actactcttcatccctcaagtcacgcgtcaccatctcaaaggacaa |
| | EEYDVLDKRRGRDPEMGGKPR | ctctaagaatcaggtgtcactgaaactgtcatctgtgaccgcagcc |
| | RKNPQEGLYNELQKDKMAEAY | gacaccgccgtgtactattgcgctaagcattactattatggcggga |
| | SEIGMKGERRRGKGHDGLYQG | gctacgcaatggattactggggacagggtactctggtcaccgtgt |
| | LSTATKDTYDALHMQALPPR | ccagcaccactaccccagcaccgaggccacccaccccggctc |
| | (SEQ ID NO: 63) | ctaccatcgcctcccagcctctgtccctgcgtccggaggcatgtag |
| | | acccgcagctggtggggccgtgcatacccggggtcttgacttcgc |
| | | ctgcgatatctacatttgggcccctctggctggtacttgcggggtcct |
| | | gctgctttcactcgtgatcactctttactgtaagcgcggtcggaaga |
| | | agctgctgtacatctttaagcaacccttcatgaggcctgtgcagact |
| | | actcaagaggaggacggctgttcatgccggttcccagaggagg |
| | | aggaaggcggctgcgaactgcgcgtgaaattcagccgcagcgc |
| | | agatgctccagcctacaagcaggggcagaaccagctctacaac |
| | | gaactcaatcttggtcggagagaggagtacgacgtgctggacaa |
| | | gcggagaggacgggacccagaaatgggcgggaagccgcgc |
| | | agaaagaatccccaagagggcctgtacaacgagctccaaaag |
| | | gataagatggcagaagcctatagcgagattggtatgaaagggg |
| | | aacgcagaagaggcaaaggccacgacggactgtaccaggga |
| | | ctcagcaccgccaccaaggacacctatgacgctcttcacatgca |
| | | ggccctgccgcctcgg (SEQ ID NO: 64) |
| CG#c46 | MALPVTALLLPLALLLHAARPIS | atggccctccctgtcaccgccctgctgcttccgctggctcttctgctc |
| DHFR_ₘᵤₜ_ | LIAALAVDYVIGMENAMPWNLPA | cacgccgctcggcccatctctctgattgccgctctggccgtggact |
| HA_Furinmut_ | DLAWFKRNTLNKPVIMGRHTWE | acgtgatcgggatggaaaacgctatgccatggaatctgcccgcc |
| CAR19 | SIGRPLPGRKNIILSSQPSTDDR | gatctggcttggttcaagaggaacaccctgaacaagccagtgat |
| | VTWVKSVDEAIAACGDVPEIMVI | catgggcagacacacttgggagtccattggccggcccctgcctg |
| | GGGRVIEQFLPKAQKLYLTHIDA | gacgcaagaacatcattctgagctcccagccctctaccgacgac |
| | EVEGDTHFPDYEPDDWESVFS | agggtgacatgggtgaaaagtgtggacgaagccattgccgcttg |
| | EFHDADAQNSHSYCFEILERRY | cggagatgtgcccgagatcatggtcatcggcggagggagagtg |
| | PYDVPDYAFPVDATKREIVMTQ | atcgagcagttcctgcctaaggcccagaaactgtacctgactcac |
| | SPATLSLSPGERATLSCRASQDI | attgacgctgaggtggaaggggacacccattttcctgattatgagc |
| | SKYLNWYQQKPGQAPRLLIYHT | cagacgattgggaaagcgtgttctccgagtttcacgacgccgatg |
| | SRLHSGIPARFSGSGSGTDYTL | ctcagaactctcatagttattgctttgagatcctggaaaggagatac |
| | TISSLQPEDFAVYFCQQGNTLPY | ccttatgatgttcctgattatgctttccccgtggatgctactaaaaga |
| | TFGQGTKLEIKGGGGSGGGGS | gaaattgtgatgacccagtcacccgccactcttagcctttcacccg |
| | GGGGSQVQLQESGPGLVKPSE | gtgagcgcgcaaccctgtcttgcagagcctcccaagacatctca |
| | TLSLTCTVSGVSLPDYGVSWIR | aaataccttaattggtatcaacagaagcccggacaggctcctcgc |
| | QPPGKGLEWIGVIWGSETTYYS | cttctgatctaccacaccagccggctccattctggaatccctgcca |
| | SSLKSRVTISKDNSKNQVSLKLS | ggttcagcggtagcggatctgggaccgactacaccctcactatca |
| | SVTAADTAVYYCAKHYYYGGSY | gctcactgcagccagaggacttcgctgtctatttctgtcagcaagg |
| | AMDYWGQGTLVTVSSTTTPAP | gaacaccctgccctacacctttggacagggcaccaagctcgag |
| | RPPTPAPTIASQPLSLRPEACRP | attaaaggtggaggtggcagcggaggaggtgggtccggcggtg |
| | AAGGAVHTRGLDFACDIYIWAPL | gaggaagccaggtccaactccaagaaagcggaccgggtcttgt |
| | AGTCGVLLLSLVITLYCKRGRKK | gaagccatcagaaactctttcactgacttgtactgtgagcggagtg |
| | LLYIFKQPFMRPVQTTQEEDGC | tctctccccgattacggggtgtcttggatcagacagccaccgggg |
| | SCRFPEEEEGGCELRVKFSRSA | aagggtctggaatggattggagtgatttggggctctgagactactt |
| | DAPAYKQGQNQLYNELNLGRR | actactcttcatccctcaagtcacgcgtcaccatctcaaaggacaa |
| | EEYDVLDKRRGRDPEMGGKPR | ctctaagaatcaggtgtcactgaaactgtcatctgtgaccgcagcc |
| | RKNPQEGLYNELQKDKMAEAY | gacaccgccgtgtactattgcgctaagcattactattatggcggga |
| | SEIGMKGERRRGKGHDGLYQG | gctacgcaatggattactggggacagggtactctggtcaccgtgt |
| | LSTATKDTYDALHMQALPPR | ccagcaccactaccccagcaccgaggccacccaccccggctc |
| | (SEQ ID NO: 65) | ctaccatcgcctcccagcctctgtccctgcgtccggaggcatgtag |
| | | acccgcagctggtggggccgtgcatacccggggtcttgacttcgc |
| | | ctgcgatatctacatttgggcccctctggctggtacttgcggggtcct |
| | | gctgctttcactcgtgatcactctttactgtaagcgcggtcggaaga |
| | | agctgctgtacatctttaagcaacccttcatgaggcctgtgcagact |
| | | actcaagaggaggacggctgttcatgccggttcccagaggagg |
| | | aggaaggcggctgcgaactgcgcgtgaaattcagccgcagcgc |
| | | agatgctccagcctacaagcaggggcagaaccagctctacaac |
| | | gaactcaatcttggtcggagagaggagtacgacgtgctggacaa |
| | | gcggagaggacgggacccagaaatgggcgggaagccgcgc |
| | | agaaagaatccccaagagggcctgtacaacgagctccaaaag |
| | | gataagatggcagaagcctatagcgagattggtatgaaagggg |
| | | aacgcagaagaggcaaaggccacgacggactgtaccaggga |
| | | ctcagcaccgccaccaaggacacctatgacgctcttcacatgca |
| | | ggccctgccgcctcgg (SEQ ID NO: 66) |
| CG#c47 | MALPVTALLLPLALLLHAARPR | atggccctccctgtcaccgccctgctgcttccgctggctcttctgctc |
| ERₘᵤₜ_HA_ | SSLALSLTADQMVSALLDAEPPI | cacgccgctcggccccggtcgtcgttggcactttccctgactgccg |
| Furin-CAR19 | LYSEYDPTRPFSEASMMGLLTN | accagatggtgtccgcccttctggacgccgagcctccaattctgta |
| | LADRELVHMINWAKRVPGFVDL | ctcggagtacgatccgactcgcccgttctccgaagccagcatgat |
| | ALHDQVHLLECAWMEILMIGLV | gggcctgttgactaacctggcggaccgcgagttggtgcacatgat |
| | WRSMEHPGKLLFAPNLLLDRNQ | taactgggctaagcgggtgccgggcttcgtggacctggccctgca |
| | GKCVEGGVEIFDMLLATSSRFR | cgaccaagtgcacctcctggaatgcgcctggatggaaatcctcat |
| | MMNLQGEEFVCLKSIILLNSGVY | gatcggcctcgtgtggagatccatggagcatcccggaaagctcct |
| | TFLSSTLKSLEEKDHIHRVLDKIT | gtttgcacccaacctcctgcttgatcgcaaccagggaaaatgcgt |
| | DTLIHLMAKAGLTLQQQHQRLA | ggaagggggtgtcgagattttcgacatgctgctcgccacctcttcc |
| | QLLLILSHIRHMSSKRMEHLYSM | cggttccggatgatgaatctgcagggagaagagttcgtgtgtctga |
| | KCKNVVPLSDLLLEMLDAHRLY | agtcaatcatcctgctgaactccggggtctataccttcctgagctcg |
| | PYDVPDYAFPVDRTKREIVMTQ | accctcaagtcactggaggaaaaagaccacatccatcgcgtgct |
| | SPATLSLSPGERATLSCRASQDI | cgataagatcaccgacacccttatccatctcatggcgaaggctgg |
| | SKYLNWYQQKPGQAPRLLIYHT | actgaccctgcaacagcagcaccagaggctggcccagttgctg |
| | SRLHSGIPARFSGSGSGTDYTL | ctgattctgagccacatccggcacatgtcgtccaagaggatggaa |
| | TISSLQPEDFAVYFCQQGNTLPY | cacctgtacagcatgaagtgcaagaacgtcgtgcctctgtccgat |
| | TFGQGTKLEIKGGGGSGGGGS | ctgctcctggaaatgctggacgcgcacagactctacccttatgatg |
| | GGGGSQVQLQESGPGLVKPSE | ttcctgattatgctttccccgtggatcgtactaaaagagaaattgtga |
| | TLSLTCTVSGVSLPDYGVSWIR | tgacccagtcacccgccactcttagcctttcacccggtgagcgcg |
| | QPPGKGLEWIGVIWGSETTYYS | caaccctgtcttgcagagcctcccaagacatctcaaaatacctta |
| | SSLKSRVTISKDNSKNQVSLKLS | attggtatcaacagaagcccggacaggctcctcgccttctgatcta |
| | SVTAADTAVYYCAKHYYYGGSY | ccacaccagccggctccattctggaatccctgccaggttcagcgg |
| | AMDYWGQGTLVTVSSTTTPAP | tagcggatctgggaccgactacaccctcactatcagctcactgca |
| | RPPTPAPTIASQPLSLRPEACRP | gccagaggacttcgctgtctatttctgtcagcaagggaacaccctg |
| | AAGGAVHTRGLDFACDIYIWAPL | ccctacacctttggacagggcaccaagctcgagattaaaggtgg |
| | AGTCGVLLLSLVITLYCKRGRKK | aggtggcagcggaggaggtgggtccggcggtggaggaagcca |
| | LLYIFKQPFMRPVQTTQEEDGC | ggtccaactccaagaaagcggaccgggtcttgtgaagccatcag |
| | SCRFPEEEEGGCELRVKFSRSA | aaactctttcactgacttgtactgtgagcggagtgtctctccccgatt |
| | DAPAYKQGQNQLYNELNLGRR | acggggtgtcttggatcagacagccaccggggaagggtctgga |
| | EEYDVLDKRRGRDPEMGGKPR | atggattggagtgatttggggctctgagactacttactactcttcatc |
| | RKNPQEGLYNELQKDKMAEAY | cctcaagtcacgcgtcaccatctcaaaggacaactctaagaatc |
| | SEIGMKGERRRGKGHDGLYQG | aggtgtcactgaaactgtcatctgtgaccgcagccgacaccgcc |
| | LSTATKDTYDALHMQALPPR | gtgtactattgcgctaagcattactattatggcgggagctacgcaat |
| | (SEQ ID NO: 67) | ggattactggggacagggtactctggtcaccgtgtccagcaccac |
| | | taccccagcaccgaggccacccaccccggctcctaccatcgcct |
| | | cccagcctctgtccctgcgtccggaggcatgtagacccgcagctg |
| | | gtggggccgtgcatacccggggtcttgacttcgcctgcgatatcta |
| | | catttgggcccctctggctggtacttgcggggtcctgctgctttcact |
| | | cgtgatcactctttactgtaagcgcggtcggaagaagctgctgtac |
| | | atctttaagcaacccttcatgaggcctgtgcagactactcaagagg |
| | | aggacggctgttcatgccggttcccagaggaggaggaaggcgg |
| | | ctgcgaactgcgcgtgaaattcagccgcagcgcagatgctccag |
| | | cctacaagcaggggcagaaccagctctacaacgaactcaatctt |
| | | ggtcggagagaggagtacgacgtgctggacaagcggagagg |
| | | acgggacccagaaatgggcgggaagccgcgcagaaagaatc |
| | | cccaagagggcctgtacaacgagctccaaaaggataagatgg |
| | | cagaagcctatagcgagattggtatgaaaggggaacgcagaa |
| | | gaggcaaaggccacgacggactgtaccagggactcagcaccg |
| | | ccaccaaggacacctatgacgctcttcacatgcaggccctgccg |
| | | cctcgg (SEQ ID NO: 68) |
| CG#c48 | MALPVTALLLPLALLLHAARPR | atggccctccctgtcaccgccctgctgcttccgctggctcttctgctc |
| ERₘᵤₜ_HA_Fu | SSLALSLTADQMVSALLDAEPPI | cacgccgctcggccccggtcgtcgttggcactttccctgactgccg |
| rinMmut_CA | LYSEYDPTRPFSEASMMGLLTN | accagatggtgtccgcccttctggacgccgagcctccaattctgta |
| R19 | LADRELVHMINWAKRVPGFVDL | ctcggagtacgatccgactcgcccgttctccgaagccagcatgat |
| | ALHDQVHLLECAWMEILMIGLV | gggcctgttgactaacctggcggaccgcgagttggtgcacatgat |
| | WRSMEHPGKLLFAPNLLLDRNQ | taactgggctaagcgggtgccgggcttcgtggacctggccctgca |
| | GKCVEGGVEIFDMLLATSSRFR | cgaccaagtgcacctcctggaatgcgcctggatggaaatcctcat |
| | MMNLQGEEFVCLKSIILLNSGVY | gatcggcctcgtgtggagatccatggagcatcccggaaagctcct |
| | TFLSSTLKSLEEKDHIHRVLDKIT | gtttgcacccaacctcctgcttgatcgcaaccagggaaaatgcgt |
| | DTLIHLMAKAGLTLQQQHQRLA | ggaagggggtgtcgagattttcgacatgctgctcgccacctcttcc |
| | QLLLILSHIRHMSSKRMEHLYSM | cggttccggatgatgaatctgcagggagaagagttcgtgtgtctga |
| | KCKNVVPLSDLLLEMLDAHRLY | agtcaatcatcctgctgaactccggggtctataccttcctgagctcg |
| | PYDVPDYAFPVDATKREIVMTQ | accctcaagtcactggaggaaaaagaccacatccatcgcgtgct |
| | SPATLSLSPGERATLSCRASQDI | cgataagatcaccgacacccttatccatctcatggcgaaggctgg |
| | SKYLNWYQQKPGQAPRLLIYHT | actgaccctgcaacagcagcaccagaggctggcccagttgctg |
| | SRLHSGIPARFSGSGSGTDYTL | ctgattctgagccacatccggcacatgtcgtccaagaggatggaa |
| | TISSLQPEDFAVYFCQQGNTLPY | cacctgtacagcatgaagtgcaagaacgtcgtgcctctgtccgat |
| | TFGQGTKLEIKGGGGSGGGGS | ctgctcctggaaatgctggacgcgcacagactctacccttatgatg |
| | GGGGSQVQLQESGPGLVKPSE | ttcctgattatgctttccccgtggatgctactaaaagagaaattgtga |
| | TLSLTCTVSGVSLPDYGVSWIR | tgacccagtcacccgccactcttagcctttcacccggtgagcgcg |
| | QPPGKGLEWIGVIWGSETTYYS | caaccctgtcttgcagagcctcccaagacatctcaaaatacctta |
| | SSLKSRVTISKDNSKNQVSLKLS | attggtatcaacagaagcccggacaggctcctcgccttctgatcta |
| | SVTAADTAVYYCAKHYYYGGSY | ccacaccagccggctccattctggaatccctgccaggttcagcgg |
| | AMDYWGQGTLVTVSSTTTPAP | tagcggatctgggaccgactacaccctcactatcagctcactgca |
| | RPPTPAPTIASQPLSLRPEACRP | gccagaggacttcgctgtctatttctgtcagcaagggaacaccctg |
| | AAGGAVHTRGLDFACDIYIWAPL | ccctacacctttggacagggcaccaagctcgagattaaaggtgg |
| | AGTCGVLLLSLVITLYCKRGRKK | aggtggcagcggaggaggtgggtccggcggtggaggaagcca |
| | LLYIFKQPFMRPVQTTQEEDGC | ggtccaactccaagaaagcggaccgggtcttgtgaagccatcag |
| | SCRFPEEEEGGCELRVKFSRSA | aaactctttcactgacttgtactgtgagcggagtgtctctccccgatt |
| | DAPAYKQGQNQLYNELNLGRR | acggggtgtcttggatcagacagccaccggggaagggtctgga |
| | EEYDVLDKRRGRDPEMGGKPR | atggattggagtgatttggggctctgagactacttactactcttcatc |
| | RKNPQEGLYNELQKDKMAEAY | cctcaagtcacgcgtcaccatctcaaaggacaactctaagaatc |
| | SEIGMKGERRRGKGHDGLYQG | aggtgtcactgaaactgtcatctgtgaccgcagccgacaccgcc |
| | LSTATKDTYDALHMQALPPR | gtgtactattgcgctaagcattactattatggcgggagctacgcaat |
| | (SEQ ID NO: 69) | ggattactggggacagggtactctggtcaccgtgtccagcaccac |
| | | taccccagcaccgaggccacccaccccggctcctaccatcgcct |
| | | cccagcctctgtccctgcgtccggaggcatgtagacccgcagctg |
| | | gtggggccgtgcatacccggggtcttgacttcgcctgcgatatcta |
| | | catttgggcccctctggctggtacttgcggggtcctgctgctttcact |
| | | cgtgatcactctttactgtaagcgcggtcggaagaagctgctgtac |
| | | atctttaagcaacccttcatgaggcctgtgcagactactcaagagg |
| | | aggacggctgttcatgccggttcccagaggaggaggaaggcgg |
| | | ctgcgaactgcgcgtgaaattcagccgcagcgcagatgctccag |
| | | cctacaagcaggggcagaaccagctctacaacgaactcaatctt |
| | | ggtcggagagaggagtacgacgtgctggacaagcggagagg |
| | | acgggacccagaaatgggcgggaagccgcgcagaaag aatc |
| | | cccaagagggcctgtacaacgagctccaaaaggataagatgg |
| | | cagaagcctatagcgagattggtatgaaaggggaacgcagaa |
| | | gaggcaaaggccacgacggactgtaccagggactcagcaccg |
| | | ccaccaaggacacctatgacgctcttcacatgcaggccctgccg |
| | | cctcgg (SEQ ID NO: 70) |
| CG#c71 | MALPVTALLLPLALLLHAARPG | atggccctccctgtcaccgccctgctgcttccgctggctcttctgctc |
| FKBPₘᵤₜ_HA | VQVETISPGDGRTFPKRGQTCV | cacgccgctcggcccggagtgcaggtggaaaccatctccccag |
| noFurin_CAR | VHYTGMLEDGKKVDSSRDRNK | gagacgggcgcaccttccccaagcgcggccagacctgtgtggt |
| 19 | PFKFMLGKQEVIRGWEEGVAQ | gcactacaccgggatgcttgaagatggaaagaaagtcgattcct |
| | MSVGQRAKLTISPDYAYGATGH | cccgggacagaaacaagccctttaagtttatgctaggcaagcag |
| | PGIIPPHATLVFDVELLKPEYPYD | gaggtgatccgaggctgggaagaaggggttgcccagatgagtg |
| | VPDYAFPVDEIVMTQSPATLSLS | tgggtcagagagccaaactgactatatctccagattatgcctatgg |
| | PGERATLSCRASQDISKYLNWY | tgccactgggcacccaggcatcatcccaccacatgccactctcgt |
| | QQKPGQAPRLLIYHTSRLHSGIP | cttcgatgtggagcttctaaaaccggaatacccttatgatgttcctg |
| | ARFSGSGSGTDYTLTISSLQPED | attatgctttccccgtggatgaaattgtgatgacccagtcacccgcc |
| | FAVYFCQQGNTLPYTFGQGTKL | actcttagcctttcacccggtgagcgcgcaaccctgtcttgcagag |
| | EIKGGGGSGGGGSGGGGSQV | cctcccaagacatctcaaaataccttaattggtatcaacagaagc |
| | QLQESGPGLVKPSETLSLTCTV | ccggacaggctcctcgccttctgatctaccacaccagccggctcc |
| | SGVSLPDYGVSWIRQPPGKGLE | attctggaatccctgccaggttcagcggtagcggatctgggaccg |
| | WIGVIWGSETTYYSSSLKSRVTI | actacaccctcactatcagctcactgcagccagaggacttcgctgt |
| | SKDNSKNQVSLKLSSVTAADTA | ctatttctgtcagcaagggaacaccctgccctacacctttggacag |
| | VYYCAKHYYYGGSYAMDYWGQ | ggcaccaagctcgagattaaaggtggaggtggcagcggagga |
| | GTLVTVSSTTTPAPRPPTPAPTI | ggtgggtccggcggtggaggaagccaggtccaactccaagaa |
| | ASQPLSLRPEACRPAAGGAVHT | agcggaccgggtcttgtgaagccatcagaaactctttcactgactt |
| | RGLDFACDIYIWAPLAGTCGVLL | gtactgtgagcggagtgtctctccccgattacggggtgtcttggatc |
| | LSLVITLYCKRGRKKLLYIFKQPF | agacagccaccggggaagggtctggaatggattggagtgatttg |
| | MRPVQTTQEEDGCSCRFPEEE | gggctctgagactacttactactcttcatccctcaagtcacgcgtca |
| | EGGCELRVKFSRSADAPAYKQ | ccatctcaaaggacaactctaagaatcaggtgtcactgaaactgt |
| | GQNQLYNELNLGRREEYDVLDK | catctgtgaccgcagccgacaccgccgtgtactattgcgctaagc |
| | RRGRDPEMGGKPRRKNPQEGL | attactattatggcgggagctacgcaatggattactggggacagg |
| | YNELQKDKMAEAYSEIGMKGER | gtactctggtcaccgtgtccagcaccactaccccagcaccgagg |
| | RRGKGHDGLYQGLSTATKDTY | ccacccaccccggctcctaccatcgcctcccagcctctgtccctgc |
| | DALHMQALPPR (SEQ ID NO: | gtccggaggcatgtagacccgcagctggtggggccgtgcatacc |
| | 71) | cggggtcttgacttcgcctgcgatatctacatttgggcccctctggct |
| | | ggtacttgcggggtcctgctgctttcactcgtgatcactctttactgta |
| | | agcgcggtcggaagaagctgctgtacatctttaagcaacccttcat |
| | | gaggcctgtgcagactactcaagaggaggacggctgttcatgcc |
| | | ggttcccagaggaggaggaaggcggctgcgaactgcgcgtga |
| | | aattcagccgcagcgcagatgctccagcctacaagcaggggca |
| | | gaaccagctctacaacgaactcaatcttggtcggagagaggagt |
| | | acgacgtgctggacaagcggagaggacgggacccagaaatg |
| | | ggcgggaagccgcgcagaaagaatccccaagagggcctgtac |
| | | aacgagctccaaaaggataagatggcagaagcctatagcgag |
| | | attggtatgaaaggggaacgcagaagaggcaaaggccacgac |
| | | ggactgtaccagggactcagcaccgccaccaaggacacctatg |
| | | acgctcttcacatgcaggccctgccgcctcgg (SEQ ID NO: 72) |
| CG#c72 | MALPVTALLLPLALLLHAARPR | atggccctccctgtcaccgccctgctgcttccgctggctcttctgctc |
| ERₘᵤₜ_HA_no | SSLALSLTADQMVSALLDAEPPI | cacgccgctcggccccggtcgtcgttggcactttccctgactgccg |
| FurinCAR19 | LYSEYDPTRPFSEASMMGLLTN | accagatggtgtccgcccttctggacgccgagcctccaattctgta |
| | LADRELVHMINWAKRVPGFVDL | ctcggagtacgatccgactcgcccgttctccgaagccagcatgat |
| | ALHDQVHLLECAWMEILMIGLV | gggcctgttgactaacctggcggaccgcgagttggtgcacatgat |
| | WRSMEHPGKLLFAPNLLLDRNQ | taactgggctaagcgggtgccgggcttcgtggacctggccctgca |
| | GKCVEGGVEIFDMLLATSSRFR | cgaccaagtgcacctcctggaatgcgcctggatggaaatcctcat |
| | MMNLQGEEFVCLKSIILLNSGVY | gatcggcctcgtgtggagatccatggagcatcccggaaagctcct |
| | TFLSSTLKSLEEKDHIHRVLDKIT | gtttgcacccaacctcctgcttgatcgcaaccagggaaaatgcgt |
| | DTLIHLMAKAGLTLQQQHQRLA | ggaagggggtgtcgagattttcgacatgctgctcgccacctcttcc |
| | QLLLILSHIRHMSSKRMEHLYSM | cggttccggatgatgaatctgcagggagaagagttcgtgtgtctga |
| | KCKNVVPLSDLLLEMLDAHRLY | agtcaatcatcctgctgaactccggggtctataccttcctgagctcg |
| | PYDVPDYAFPVDEIVMTQSPATL | accctcaagtcactggaggaaaaagaccacatccatcgcgtgct |
| | SLSPGERATLSCRASQDISKYLN | cgataagatcaccgacacccttatccatctcatggcgaaggctgg |
| | WYQQKPGQAPRLLIYHTSRLHS | actgaccctgcaacagcagcaccagaggctggcccagttgctg |
| | GIPARFSGSGSGTDYTLTISSLQ | ctgattctgagccacatccggcacatgtcgtccaagaggatggaa |
| | PEDFAVYFCQQGNTLPYTFGQG | cacctgtacagcatgaagtgcaagaacgtcgtgcctctgtccgat |
| | TKLEIKGGGGSGGGGSGGGGS | ctgctcctggaaatgctggacgcgcacagactctacccttatgatg |
| | QVQLQESGPGLVKPSETLSLTC | ttcctgattatgctttccccgtggatgaaattgtgatgacccagtcac |
| | TVSGVSLPDYGVSWIRQPPGKG | ccgccactcttagcctttcacccggtgagcgcgcaaccctgtcttg |
| | LEWIGVIWGSETTYYSSSLKSRV | cagagcctcccaagacatctcaaaataccttaattggtatcaaca |
| | TISKDNSKNQVSLKLSSVTAADT | gaagcccggacaggctcctcgccttctgatctaccacaccagcc |
| | AVYYCAKHYYYGGSYAMDYWG | ggctccattctggaatccctgccaggttcagcggtagcggatctgg |
| | QGTLVTVSSTTTPAPRPPTPAPT | gaccgactacaccctcactatcagctcactgcagccagaggactt |
| | IASQPLSLRPEACRPAAGGAVH | cgctgtctatttctgtcagcaagggaacaccctgccctacacctttg |
| | TRGLDFACDIYIWAPLAGTCGVL | gacagggcaccaagctcgagattaaaggtggaggtggcagcg |
| | LLSLVITLYCKRGRKKLLYIFKQP | gaggaggtgggtccggcggtggaggaagccaggtccaactcc |
| | FMRPVQTTQEEDGCSCRFPEE | aagaaagcggaccgggtcttgtgaagccatcagaaactctttca |
| | EEGGCELRVKFSRSADAPAYKQ | ctgacttgtactgtgagcggagtgtctctccccgattacggggtgtct |
| | GQNQLYNELNLGRREEYDVLDK | tggatcagacagccaccggggaagggtctggaatggattggagt |
| | RRGRDPEMGGKPRRKNPQEGL | gatttggggctctgagactacttactactcttcatccctcaagtcacg |
| | YNELQKDKMAEAYSEIGMKGER | cgtcaccatctcaaaggacaactctaagaatcaggtgtcactgaa |
| | RRGKGHDGLYQGLSTATKDTY | actgtcatctgtgaccgcagccgacaccgccgtgtactattgcgct |
| | DALHMQALPPR (SEQ ID NO: | aagcattactattatggcgggagctacgcaatggattactgggga |
| | 73) | cagggtactctggtcaccgtgtccagcaccactaccccagcacc |
| | | gaggccacccaccccggctcctaccatcgcctcccagcctctgtc |
| | | cctgcgtccggaggcatgtagacccgcagctggtggggccgtgc |
| | | atacccggggtcttgacttcgcctgcgatatctacatttgggcccct |
| | | ctggctggtacttgcggggtcctgctgctttcactcgtgatcactcttt |
| | | actgtaagcgcggtcggaagaagctgctgtacatctttaagcaac |
| | | ccttcatgaggcctgtgcagactactcaagaggaggacggctgtt |
| | | catgccggttcccagaggaggaggaaggcggctgcgaactgc |
| | | gcgtgaaattcagccgcagcgcagatgctccagcctacaagca |
| | | ggggcagaaccagctctacaacgaactcaatcttggtcggaga |
| | | gaggagtacgacgtgctggacaagcggagaggacgggaccc |
| | | agaaatgggcgggaagccgcgcagaaagaatccccaagagg |
| | | gcctgtacaacgagctccaaaaggataagatggcagaagccta |
| | | tagcgagattggtatgaaaggggaacgcagaagaggcaaagg |
| | | ccacgacggactgtaccagggactcagcaccgccaccaagga |
| | | cacctatgacgctcttcacatgcaggccctgccgcctcgg (SEQ |
| | | ID NO: 74) |
| CG#c73 | MALPVTALLLPLALLLHAARPR | atggccctccctgtcaccgccctgctgcttccgctggctcttctgctc |
| ERₘᵤₜ_noHa_ | SSLALSLTADQMVSALLDAEPPI | cacgccgctcggccccggtcgtcgttggcactttccctgactgccg |
| FurinCAR19 | LYSEYDPTRPFSEASMMGLLTN | accagatggtgtccgcccttctggacgccgagcctccaattctgta |
| | LADRELVHMINWAKRVPGFVDL | ctcggagtacgatccgactcgcccgttctccgaagccagcatgat |
| | ALHDQVHLLECAWMEILMIGLV | gggcctgttgactaacctggcggaccgcgagttggtgcacatgat |
| | WRSMEHPGKLLFAPNLLLDRNQ | taactgggctaagcgggtgccgggcttcgtggacctggccctgca |
| | GKCVEGGVEIFDMLLATSSRFR | cgaccaagtgcacctcctggaatgcgcctggatggaaatcctcat |
| | MMNLQGEEFVCLKSIILLNSGVY | gatcggcctcgtgtggagatccatggagcatcccggaaagctcct |
| | TFLSSTLKSLEEKDHIHRVLDKIT | gtttgcacccaacctcctgcttgatcgcaaccagggaaaatgcgt |
| | DTLIHLMAKAGLTLQQQHQRLA | ggaagggggtgtcgagattttcgacatgctgctcgccacctcttcc |
| | QLLLILSHIRHMSSKRMEHLYSM | cggttccggatgatgaatctgcagggagaagagttcgtgtgtctga |
| | KCKNVVPLSDLLLEMLDAHRLR | agtcaatcatcctgctgaactccggggtctataccttcctgagctcg |
| | TKREIVMTQSPATLSLSPGERAT | accctcaagtcactggaggaaaaagaccacatccatcgcgtgct |
| | LSCRASQDISKYLNWYQQKPGQ | cgataagatcaccgacacccttatccatctcatggcgaaggctgg |
| | APRLLIYHTSRLHSGIPARFSGS | actgaccctgcaacagcagcaccagaggctggcccagttgctg |
| | GSGTDYTLTISSLQPEDFAVYFC | ctgattctgagccacatccggcacatgtcgtccaagaggatggaa |
| | QQGNTLPYTFGQGTKLEIKGGG | cacctgtacagcatgaagtgcaagaacgtcgtgcctctgtccgat |
| | GSGGGGSGGGGSQVQLQESG | ctgctcctggaaatgctgg acgcgcacagactccgtactaaaag |
| | PGLVKPSETLSLTCTVSGVSLPD | agaaattgtgatgacccagtcacccgccactcttagcctttcaccc |
| | YGVSWIRQPPGKGLEWIGVIWG | ggtgagcgcgcaaccctgtcttgcagagcctcccaagacatctc |
| | SETTYYSSSLKSRVTISKDNSKN | aaaataccttaattggtatcaacagaagcccggacaggctcctcg |
| | QVSLKLSSVTAADTAVYYCAKH | ccttctgatctaccacaccagccggctccattctggaatccctgcc |
| | YYYGGSYAMDYWGQGTLVTVS | aggttcagcggtagcggatctgggaccgactacaccctcactatc |
| | STTTPAPRPPTPAPTIASQPLSL | agctcactgcagccagaggacttcgctgtctatttctgtcagcaag |
| | RPEACRPAAGGAVHTRGLDFA | ggaacaccctgccctacacctttggacagggcaccaagctcga |
| | CDIYIWAPLAGTCGVLLLSLVITL | gattaaaggtggaggtggcagcggaggaggtgggtccggcggt |
| | YCKRGRKKLLYIFKQPFMRPVQ | ggaggaagccaggtccaactccaagaaagcggaccgggtctt |
| | TTQEEDGCSCRFPEEEEGGCEL | gtgaagccatcagaaactctttcactgacttgtactgtgagcggag |
| | RVKFSRSADAPAYKQGQNQLY | tgtctctccccgattacggggtgtcttggatcagacagccaccggg |
| | NELNLGRREEYDVLDKRRGRDP | gaagggtctggaatggattggagtgatttggggctctgagactact |
| | EMGGKPRRKNPQEGLYNELQK | tactactcttcatccctcaagtcacgcgtcaccatctcaaaggaca |
| | DKMAEAYSEIGMKGERRRGKG | actctaagaatcaggtgtcactgaaactgtcatctgtgaccgcagc |
| | HDGLYQGLSTATKDTYDALHMQ | cgacaccgccgtgtactattgcgctaagcattactattatggcggg |
| | ALPPR (SEQ ID NO: 75) | agctacgcaatggattactggggacagggtactctggtcaccgtg |
| | | tccagcaccactaccccagcaccgaggccacccaccccggctc |
| | | ctaccatcgcctcccagcctctgtccctgcgtccggaggcatgtag |
| | | acccgcagctggtggggccgtgcatacccggggtcttgacttcgc |
| | | ctgcgatatctacatttgggcccctctggctggtacttgcggggtcct |
| | | gctgctttcactcgtgatcactctttactgtaagcgcggtcggaaga |
| | | agctgctgtacatctttaagcaacccttcatgaggcctgtgcagact |
| | | actcaagaggaggacggctgttcatgccggttcccagaggagg |
| | | aggaaggcggctgcgaactgcgcgtgaaattcagccgcagcgc |
| | | agatgctccagcctacaagcaggggcagaaccagctctacaac |
| | | gaactcaatcttggtcggagagaggagtacgacgtgctggacaa |
| | | gcggagaggacgggacccagaaatgggcgggaagccgcgc |
| | | agaaagaatccccaagagggcctgtacaacgagctccaaaag |
| | | gataagatggcagaagcctatagcgagattggtatgaaagggg |
| | | aacgcagaagaggcaaaggccacgacggactgtaccaggga |
| | | ctcagcaccgccaccaaggacacctatgacgctcttcacatgca |
| | | ggccctgccgcctcgg (SEQ ID NO: 76) |
| CG#c74 | MALPVTALLLPLALLLHAARPR | atggccctccctgtcaccgccctgctgcttccgctggctcttctgctc |
| ERₘᵤₜ_noHa_ | SSLALSLTADQMVSALLDAEPPI | cacgccgctcggccccggtcgtcgttggcactttccctgactgccg |
| noFurin- | LYSEYDPTRPFSEASMMGLLTN | accagatggtgtccgcccttctggacgccgagcctccaattctgta |
| CAR19 | LADRELVHMINWAKRVPGFVDL | ctcggagtacgatccgactcgcccgttctccgaagccagcatgat |
| | ALHDQVHLLECAWMEILMIGLV | gggcctgttgactaacctggcggaccgcgagttggtgcacatgat |
| | WRSMEHPGKLLFAPNLLLDRNQ | taactgggctaagcgggtgccgggcttcgtggacctggccctgca |
| | GKCVEGGVEIFDMLLATSSRFR | cgaccaagtgcacctcctggaatgcgcctggatggaaatcctcat |
| | MMNLQGEEFVCLKSIILLNSGVY | gatcggcctcgtgtggagatccatggagcatcccggaaagctcct |
| | TFLSSTLKSLEEKDHIHRVLDKIT | gtttgcacccaacctcctgcttgatcgcaaccagggaaaatgcgt |
| | DTLIHLMAKAGLTLQQQHQRLA | ggaagggggtgtcgagattttcgacatgctgctcgccacctcttcc |
| | QLLLILSHIRHMSSKRMEHLYSM | cggttccggatgatgaatctgcagggagaagagttcgtgtgtctga |
| | KCKNVVPLSDLLLEMLDAHRLEI | agtcaatcatcctgctgaactccggggtctataccttcctgagctcg |
| | VMTQSPATLSLSPGERATLSCR | accctcaagtcactggaggaaaaagaccacatccatcgcgtgct |
| | ASQDISKYLNWYQQKPGQAPRL | cgataagatcaccgacacccttatccatctcatggcgaaggctgg |
| | LIYHTSRLHSGIPARFSGSGSGT | actgaccctgcaacagcagcaccagaggctggcccagttgctg |
| | DYTLTISSLQPEDFAVYFCQQG | ctgattctgagccacatccggcacatgtcgtccaagaggatggaa |
| | NTLPYTFGQGTKLEIKGGGGSG | cacctgtacagcatgaagtgcaagaacgtcgtgcctctgtccgat |
| | GGGSGGGGSQVQLQESGPGLV | ctgctcctggaaatgctggacgcgcacagactcgaaattgtgatg |
| | KPSETLSLTCTVSGVSLPDYGV | acccagtcacccgccactcttagcctttcacccggtgagcgcgca |
| | SWIRQPPGKGLEWIGVIWGSET | accctgtcttgcagagcctcccaagacatctcaaaataccttaatt |
| | TYYSSSLKSRVTISKDNSKNQVS | ggtatcaacagaagcccggacaggctcctcgccttctgatctacc |
| | LKLSSVTAADTAVYYCAKHYYY | acaccagccggctccattctggaatccctgccaggttcagcggta |
| | GGSYAMDYWGQGTLVTVSSTT | gcggatctgggaccgactacaccctcactatcagctcactgcagc |
| | TPAPRPPTPAPTIASQPLSLRPE | cagaggacttcgctgtctatttctgtcagcaagggaacaccctgcc |
| | ACRPAAGGAVHTRGLDFACDIYI | ctacacctttggacagggcaccaagctcgagattaaaggtggag |
| | WAPLAGTCGVLLLSLVITLYCKR | gtggcagcggaggaggtgggtccggcggtggaggaagccagg |
| | GRKKLLYIFKQPFMRPVQTTQE | tccaactccaagaaagcggaccgggtcttgtgaagccatcagaa |
| | EDGCSCRFPEEEEGGCELRVKF | actctttcactgacttgtactgtgagcggagtgtctctccccgattac |
| | SRSADAPAYKQGQNQLYNELNL | ggggtgtcttggatcagacagccaccggggaagggtctggaatg |
| | GRREEYDVLDKRRGRDPEMGG | gattggagtgatttggggctctgagactacttactactcttcatccctc |
| | KPRRKNPQEGLYNELQKDKMA | aagtcacgcgtcaccatctcaaaggacaactctaagaatcaggt |
| | EAYSEIGMKGERRRGKGHDGL | gtcactgaaactgtcatctgtgaccgcagccgacaccgccgtgta |
| | YQGLSTATKDTYDALHMQALPP | ctattgcgctaagcattactattatggcgggagctacgcaatggatt |
| | R (SEQ ID NO: 77) | actggggacagggtactctggtcaccgtgtccagcaccactacc |
| | | ccagcaccgaggccacccaccccggctcctaccatcgcctccc |
| | | agcctctgtccctgcgtccggaggcatgtagacccgcagctggtg |
| | | gggccgtgcatacccggggtcttgacttcgcctgcgatatctacatt |
| | | tgggcccctctggctggtacttgcggggtcctgctgctttcactcgtg |
| | | atcactctttactgtaagcgcggtcggaagaagctgctgtacatctt |
| | | taagcaacccttcatgaggcctgtgcagactactcaagaggagg |
| | | acggctgttcatgccggttcccagaggaggaggaaggcggctg |
| | | cgaactgcgcgtgaaattcagccgcagcgcagatgctccagcct |
| | | acaagcaggggcagaaccagctctacaacgaactcaatcttggt |
| | | cggagagaggagtacgacgtgctggacaagcggagaggacg |
| | | ggacccagaaatgggcgggaagccgcgcagaaagaatcccc |
| | | aagagggcctgtacaacgagctccaaaaggataagatggcag |
| | | aagcctatagcgagattggtatgaaaggggaacgcagaagag |
| | | gcaaaggccacgacggactgtaccagggactcagcaccgcca |
| | | ccaaggacacctatgacgctcttcacatgcaggccctgccgcctc |
| | | gg (SEQ ID NO: 78) |
| ERₘᵤₜ.Furin- | MALPVTALLLPLALLLHAARPR | Atggccctccctgtcaccgccctgctgcttccgctggctcttctgctc |
| CAR19 = Alt1 | SSLALSLTADQMVSALLDAEPPI | cacgccgctcggccccggtcgtcgttggcactttccctgactgccg |
| | LYSEYDPTRPFSEASMMGLLTN | accagatggtgtccgcccttctggacgccgagcctccaattctgta |
| | LADRELVHMINWAKRVPGFVDL | ctcggagtacgatccgactcgcccgttctccgaagccagcatgat |
| | ALHDQVHLLECAWMEILMIGLV | gggcctgttgactaacctggcggaccgcgagttggtgcacatgat |
| | WRSMEHPGKLLFAPNLLLDRNQ | taactgggctaagcgggtgccgggcttcgtggacctggccctgca |
| | GKCVEGGVEIFDMLLATSSRFR | cgaccaagtgcacctcctggaatgcgcctggatggaaatcctcat |
| | MMNLQGEEFVCLKSIILLNSGVY | gatcggcctcgtgtggagatccatggagcatcccggaaagctcct |
| | TFLSSTLKSLEEKDHIHRVLDKIT | gtttgcacccaacctcctgcttgatcgcaaccagggaaaatgcgt |
| | DTLIHLMAKAGLTLQQQHQRLA | ggaagggggtgtcgagattttcgacatgctgctcgccacctcttcc |
| | QLLLILSHIRHMSSKRMEHLYSM | cggttccggatgatgaatctgcagggagaagagttcgtgtgtctga |
| | KCKNVVPLSDLLLEMLDAHRLSL | agtcaatcatcctgctgaactccggggtctataccttcctgagctcg |
| | NLTESHNSRKKREIVMTQSPATL | accctcaagtcactggaggaaaaagaccacatccatcgcgtgct |
| | SLSPGERATLSCRASQDISKYLN | cgataagatcaccgacacccttatccatctcatggcgaaggctgg |
| | WYQQKPGQAPRLLIYHTSRLHS | actgaccctgcaacagcagcaccagaggctggcccagttgctg |
| | GIPARFSGSGSGTDYTLTISSLQ | ctgattctgagccacatccggcacatgtcgtccaagaggatggaa |
| | PEDFAVYFCQQGNTLPYTFGQG | cacctgtacagcatgaagtgcaagaacgtcgtgcctctgtccgat |
| | TKLEIKGGGGSGGGGSGGGGS | ctgctcctggaaatgctggacgcgcacagactcagtctcaatttga |
| | QVQLQESGPGLVKPSETLSLTC | ctgagtcacacaattccaggaagaaaagggaaattgtgatgacc |
| | TVSGVSLPDYGVSWIRQPPGKG | cagtcacccgccactcttagcctttcacccggtgagcgcgcaacc |
| | LEWIGVIWGSETTYYSSSLKSRV | ctgtcttgcagagcctcccaagacatctcaaaataccttaattggta |
| | TISKDNSKNQVSLKLSSVTAADT | tcaacagaagcccggacaggctcctcgccttctgatctaccacac |
| | AVYYCAKHYYYGGSYAMDYWG | cagccggctccattctggaatccctgccaggttcagcggtagcgg |
| | QGTLVTVSSTTTPAPRPPTPAPT | atctgggaccgactacaccctcactatcagctcactgcagccaga |
| | IASQPLSLRPEACRPAAGGAVH | ggacttcgctgtctatttctgtcagcaagggaacaccctgccctac |
| | TRGLDFACDIYIWAPLAGTCGVL | acctttggacagggcaccaagctcgagattaaaggtggaggtgg |
| | LLSLVITLYCKRGRKKLLYIFKQP | cagcggaggaggtgggtccggcggtggaggaagccaggtcca |
| | FMRPVQTTQEEDGCSCRFPEE | actccaagaaagcggaccgggtcttgtgaagccatcagaaactc |
| | EEGGCELRVKFSRSADAPAYKQ | tttcactgacttgtactgtgagcggagtgtctctccccgattacgggg |
| | GQNQLYNELNLGRREEYDVLDK | tgtcttggatcagacagccaccggggaagggtctggaatggattg |
| | RRGRDPEMGGKPRRKNPQEGL | gagtgatttggggctctgagactacttactactcttcatccctcaagt |
| | YNELQKDKMAEAYSEIGMKGER | cacgcgtcaccatctcaaaggacaactctaagaatcaggtgtca |
| | RRGKGHDGLYQGLSTATKDTY | ctgaaactgtcatctgtgaccgcagccgacaccgccgtgtactatt |
| | DALHMQALPPR (SEQ ID NO: | gcgctaagcattactattatggcgggagctacgcaatggattactg |
| | 103) | gggacagggtactctggtcaccgtgtccagcaccactaccccag |
| | | caccgaggccacccaccccggctcctaccatcgcctcccagcct |
| | | ctgtccctgcgtccggaggcatgtagacccgcagctggtggggc |
| | | cgtgcatacccggggtcttgacttcgcctgcgatatctacatttggg |
| | | cccctctggctggtacttgcggggtcctgctgctttcactcgtgatca |
| | | ctctttactgtaagcgcggtcggaagaagctgctgtacatctttaag |
| | | caacccttcatgaggcctgtgcagactactcaagaggaggacgg |
| | | ctgttcatgccggttcccagaggaggaggaaggcggctgcgaa |
| | | ctgcgcgtgaaattcagccgcagcgcagatgctccagcctacaa |
| | | gcaggggcagaaccagctctacaacgaactcaatcttggtcgga |
| | | gagaggagtacgacgtgctggacaagcggagaggacgggac |
| | | ccagaaatgggcgggaagccgcgcagaaagaatccccaaga |
| | | gggcctgtacaacgagctccaaaaggataagatggcagaagc |
| | | ctatagcgagattggtatgaaaggggaacgcagaagaggcaa |
| | | aggccacgacggactgtaccagggactcagcaccgccaccaa |
| | | ggacacctatgacgctcttcacatgcaggccctgccgcctcgg |
| | | (SEQ ID NO: 104) |
| ERₘᵤₜ.Furin- | MALPVTALLLPLALLLHAARPR | atggccctccctgtcaccgccctgctgcttccgctggctcttctgctc |
| CAR19 = Alt2 | SSLALSLTADQMVSALLDAEPPI | cacgccgctcggccccggtcgtcgttggcactttccctgactgccg |
| | LYSEYDPTRPFSEASMMGLLTN | accagatggtgtccgcccttctggacgccgagcctccaattctgta |
| | LADRELVHMINWAKRVPGFVDL | ctcggagtacgatccgactcgcccgttctccgaagccagcatgat |
| | ALHDQVHLLECAWMEILMIGLV | gggcctgttgactaacctggcggaccgcgagttggtgcacatgat |
| | WRSMEHPGKLLFAPNLLLDRNQ | taactgggctaagcgggtgccgggcttcgtggacctggccctgca |
| | GKCVEGGVEIFDMLLATSSRFR | cgaccaagtgcacctcctggaatgcgcctggatggaaatcctcat |
| | MMNLQGEEFVCLKSIILLNSGVY | gatcggcctcgtgtggagatccatggagcatcccggaaagctcct |
| | TFLSSTLKSLEEKDHIHRVLDKIT | gtttgcacccaacctcctgcttgatcgcaaccagggaaaatgcgt |
| | DTLIHLMAKAGLTLQQQHQRLA | ggaagggggtgtcgagattttcgacatgctgctcgccacctcttcc |
| | QLLLILSHIRHMSSKRMEHLYSM | cggttccggatgatgaatctgcagggagaagagttcgtgtgtctga |
| | KCKNVVPLSDLLLEMLDAHRLG | agtcaatcatcctgctgaactccggggtctataccttcctgagctcg |
| | TGAEDPRPSRKRREIVMTQSPA | accctcaagtcactggaggaaaaagaccacatccatcgcgtgct |
| | TLSLSPGERATLSCRASQDISKY | cgataagatcaccgacacccttatccatctcatggcgaaggctgg |
| | LNWYQQKPGQAPRLLIYHTSRL | actgaccctgcaacagcagcaccagaggctggcccagttgctg |
| | HSGIPARFSGSGSGTDYTLTISS | ctgattctgagccacatccggcacatgtcgtccaagaggatggaa |
| | LQPEDFAVYFCQQGNTLPYTFG | cacctgtacagcatgaagtgcaagaacgtcgtgcctctgtccgat |
| | QGTKLEIKGGGGSGGGGSGGG | ctgctcctggaaatgctggacgcgcacagactcgggacgggag |
| | GSQVQLQESGPGLVKPSETLSL | ctgaggatccacgacccagcagaaagcgacgggaaattgtgat |
| | TCTVSGVSLPDYGVSWIRQPPG | gacccagtcacccgccactcttagcctttcacccggtgagcgcgc |
| | KGLEWIGVIWGSETTYYSSSLKS | aaccctgtcttgcagagcctcccaagacatctcaaaataccttaat |
| | RVTISKDNSKNQVSLKLSSVTAA | tggtatcaacagaagcccggacaggctcctcgccttctgatctac |
| | DTAVYYCAKHYYYGGSYAMDY | cacaccagccggctccattctggaatccctgccaggttcagcggt |
| | WGQGTLVTVSSTTTPAPRPPTP | agcggatctgggaccgactacaccctcactatcagctcactgca |
| | APTIASQPLSLRPEACRPAAGG | gccagaggacttcgctgtctatttctgtcagcaagggaacaccctg |
| | AVHTRGLDFACDIYIWAPLAGTC | ccctacacctttggacagggcaccaagctcgagattaaaggtgg |
| | GVLLLSLVITLYCKRGRKKLLYIF | aggtggcagcggaggaggtgggtccggcggtggaggaagcca |
| | KQPFMRPVQTTQEEDGCSCRF | ggtccaactccaagaaagcggaccgggtcttgtgaagccatcag |
| | PEEEEGGCELRVKFSRSADAPA | aaactctttcactgacttgtactgtgagcggagtgtctctccccgatt |
| | YKQGQNQLYNELNLGRREEYD | acggggtgtcttggatcagacagccaccggggaagggtctgga |
| | VLDKRRGRDPEMGGKPRRKNP | atggattggagtgatttggggctctgagactacttactactcttcatc |
| | QEGLYNELQKDKMAEAYSEIGM | cctcaagtcacgcgtcaccatctcaaaggacaactctaagaatc |
| | KGERRRGKGHDGLYQGLSTAT | aggtgtcactgaaactgtcatctgtgaccgcagccgacaccgcc |
| | KDTYDALHMQALPPR (SEQ ID | gtgtactattgcgctaagcattactattatggcgggagctacgcaat |
| | NO: 105) | ggattactggggacagggtactctggtcaccgtgtccagcaccac |
| | | taccccagcaccgaggccacccaccccggctcctaccatcgcct |
| | | cccagcctctgtccctgcgtccggaggcatgtagacccgcagctg |
| | | gtggggccgtgcatacccggggtcttgacttcgcctgcgatatcta |
| | | catttgggcccctctggctggtacttgcggggtcctgctgctttcact |
| | | cgtgatcactctttactgtaagcgcggtcggaagaagctgctgtac |
| | | atctttaagcaacccttcatgaggcctgtgcagactactcaagagg |
| | | aggacggctgttcatgccggttcccagaggaggaggaaggcgg |
| | | ctgcgaactgcgcgtgaaattcagccgcagcgcagatgctccag |
| | | cctacaagcaggggcagaaccagctctacaacgaactcaatctt |
| | | ggtcggagagaggagtacgacgtgctggacaagcggagagg |
| | | acgggacccagaaatgggcgggaagccgcgcagaaagaatc |
| | | cccaagagggcctgtacaacgagctccaaaaggataagatgg |
| | | cagaagcctatagcgagattggtatgaaaggggaacgcagaa |
| | | gaggcaaaggccacgacggactgtaccagggactcagcaccg |
| | | ccaccaaggacacctatgacgctcttcacatgcaggccctgccg |
| | | cctcgg (SEQ ID NO: 106) |
| ERₘᵤₜ.Furin- | MALPVTALLLPLALLLHAARPR | Atggccctccctgtcaccgccctgctgcttccgctggctcttctgctc |
| CAR19 = Alt3 | SSLALSLTADQMVSALLDAEPPI | cacgccgctcggccccggtcgtcgttggcactttccctgactgccg |
| | LYSEYDPTRPFSEASMMGLLTN | accagatggtgtccgcccttctggacgccgagcctccaattctgta |
| | LADRELVHMINWAKRVPGFVDL | ctcggagtacgatccgactcgcccgttctccgaagccagcatgat |
| | ALHDQVHLLECAWMEILMIGLV | gggcctgttgactaacctggcggaccgcgagttggtgcacatgat |
| | WRSMEHPGKLLFAPNLLLDRNQ | taactgggctaagcgggtgccgggcttcgtggacctggccctgca |
| | GKCVEGGVEIFDMLLATSSRFR | cgaccaagtgcacctcctggaatgcgcctggatggaaatcctcat |
| | MMNLQGEEFVCLKSIILLNSGVY | gatcggcctcgtgtggagatccatggagcatcccggaaagctcct |
| | TFLSSTLKSLEEKDHIHRVLDKIT | gtttgcacccaacctcctgcttgatcgcaaccagggaaaatgcgt |
| | DTLIHLMAKAGLTLQQQHQRLA | ggaagggggtgtcgagattttcgacatgctgctcgccacctcttcc |
| | QLLLILSHIRHMSSKRMEHLYSM | cggttccggatgatgaatctgcagggagaagagttcgtgtgtctga |
| | KCKNVVPLSDLLLEMLDAHRLC | agtcaatcatcctgctgaactccggggtctataccttcctgagctcg |
| | KINGYPKRGRKRREIVMTQSPA | accctcaagtcactggaggaaaaagaccacatccatcgcgtgct |
| | TLSLSPGERATLSCRASQDISKY | cgataagatcaccgacacccttatccatctcatggcgaaggctgg |
| | LNWYQQKPGQAPRLLIYHTSRL | actgaccctgcaacagcagcaccagaggctggcccagttgctg |
| | HSGIPARFSGSGSGTDYTLTISS | ctgattctgagccacatccggcacatgtcgtccaagaggatggaa |
| | LQPEDFAVYFCQQGNTLPYTFG | cacctgtacagcatgaagtgcaagaacgtcgtgcctctgtccgat |
| | QGTKLEIKGGGGSGGGGSGGG | ctgctcctggaaatgctggacgcgcacagactctgcaagatcaa |
| | GSQVQLQESGPGLVKPSETLSL | cggctaccctaagaggggcagaaagcggcgggaaattgtgatg |
| | TCTVSGVSLPDYGVSWIRQPPG | acccagtcacccgccactcttagcctttcacccggtgagcgcgca |
| | KGLEWIGVIWGSETTYYSSSLKS | accctgtcttgcagagcctcccaagacatctcaaaataccttaatt |
| | RVTISKDNSKNQVSLKLSSVTAA | ggtatcaacagaagcccggacaggctcctcgccttctgatctacc |
| | DTAVYYCAKHYYYGGSYAMDY | acaccagccggctccattctggaatccctgccaggttcagcggta |
| | WGQGTLVTVSSTTTPAPRPPTP | gcggatctgggaccgactacaccctcactatcagctcactgcagc |
| | APTIASQPLSLRPEACRPAAGG | cagaggacttcgctgtctatttctgtcagcaagggaacaccctgcc |
| | AVHTRGLDFACDIYIWAPLAGTC | ctacacctttggacagggcaccaagctcgagattaaaggtggag |
| | GVLLLSLVITLYCKRGRKKLLYIF | gtggcagcggaggaggtgggtccggcggtggaggaagccagg |
| | KQPFMRPVQTTQEEDGCSCRF | tccaactccaagaaagcggaccgggtcttgtgaagccatcagaa |
| | PEEEEGGCELRVKFSRSADAPA | actctttcactgacttgtactgtgagcggagtgtctctccccgattac |
| | YKQGQNQLYNELNLGRREEYD | ggggtgtcttggatcagacagccaccggggaagggtctggaatg |
| | VLDKRRGRDPEMGGKPRRKNP | gattggagtgatttggggctctgagactacttactactcttcatccctc |
| | QEGLYNELQKDKMAEAYSEIGM | aagtcacgcgtcaccatctcaaaggacaactctaagaatcaggt |
| | KGERRRGKGHDGLYQGLSTAT | gtcactgaaactgtcatctgtgaccgcagccgacaccgccgtgta |
| | KDTYDALHMQALPPR (SEQ ID | ctattgcgctaagcattactattatggcgggagctacgcaatggatt |
| | NO: 107) | actggggacagggtactctggtcaccgtgtccagcaccactacc |
| | | ccagcaccgaggccacccaccccggctcctaccatcgcctccc |
| | | agcctctgtccctgcgtccggaggcatgtagacccgcagctggtg |
| | | gggccgtgcatacccggggtcttgacttcgcctgcgatatctacatt |
| | | tgggcccctctggctggtacttgcggggtcctgctgctttcactcgtg |
| | | atcactctttactgtaagcgcggtcggaagaagctgctgtacatctt |
| | | taagcaacccttcatgaggcctgtgcagactactcaagaggagg |
| | | acggctgttcatgccggttcccagaggaggaggaaggcggctg |
| | | cgaactgcgcgtgaaattcagccgcagcgcagatgctccagcct |
| | | acaagcaggggcagaaccagctctacaacgaactcaatcttggt |
| | | cggagagaggagtacgacgtgctggacaagcggagaggacg |
| | | ggacccagaaatgggcgggaagccgcgcagaaagaatcccc |
| | | aagagggcctgtacaacgagctccaaaaggataagatggcag |
| | | aagcctatagcgagattggtatgaaaggggaacgcagaagag |
| | | gcaaaggccacgacggactgtaccagggactcagcaccgcca |
| | | ccaaggacacctatgacgctcttcacatgcaggccctgccgcctc |
| | | gg (SEQ ID NO: 108) |
| ERₘᵤₜ.Furin- | MALPVTALLLPLALLLHAARPR | Atggccctccctgtcaccgccctgctgcttccgctggctcttctgctc |
| CAR19 = Alt4 | SSLALSLTADQMVSALLDAEPPI | cacgccgctcggccccggtcgtcgttggcactttccctgactgccg |
| | LYSEYDPTRPFSEASMMGLLTN | accagatggtgtccgcccttctggacgccgagcctccaattctgta |
| | LADRELVHMINWAKRVPGFVDL | ctcggagtacgatccgactcgcccgttctccgaagccagcatgat |
| | ALHDQVHLLECAWMEILMIGLV | gggcctgttgactaacctggcggaccgcgagttggtgcacatgat |
| | WRSMEHPGKLLFAPNLLLDRNQ | taactgggctaagcgggtgccgggcttcgtggacctggccctgca |
| | GKCVEGGVEIFDMLLATSSRFR | cgaccaagtgcacctcctggaatgcgcctggatggaaatcctcat |
| | MMNLQGEEFVCLKSIILLNSGVY | gatcggcctcgtgtggagatccatggagcatcccggaaagctcct |
| | TFLSSTLKSLEEKDHIHRVLDKIT | gtttgcacccaacctcctgcttgatcgcaaccagggaaaatgcgt |
| | DTLIHLMAKAGLTLQQQHQRLA | ggaagggggtgtcgagattttcgacatgctgctcgccacctcttcc |
| | QLLLILSHIRHMSSKRMEHLYSM | cggttccggatgatgaatctgcagggagaagagttcgtgtgtctga |
| | KCKNVVPLSDLLLEMLDAHRLL | agtcaatcatcctgctgaactccggggtctataccttcctgagctcg |
| | QWLEQQVAKRRTKREIVMTQSP | accctcaagtcactggaggaaaaagaccacatccatcgcgtgct |
| | ATLSLSPGERATLSCRASQDISK | cgataagatcaccgacacccttatccatctcatggcgaaggctgg |
| | YLNWYQQKPGQAPRLLIYHTSR | actgaccctgcaacagcagcaccagaggctggcccagttgctg |
| | LHSGIPARFSGSGSGTDYTLTIS | ctgattctgagccacatccggcacatgtcgtccaagaggatggaa |
| | SLQPEDFAVYFCQQGNTLPYTF | cacctgtacagcatgaagtgcaagaacgtcgtgcctctgtccgat |
| | GQGTKLEIKGGGGSGGGGSGG | ctgctcctggaaatgctggacgcgcacagactcctgcaatggctg |
| | GGSQVQLQESGPGLVKPSETLS | gagcagcaggtggcgaagcggagaactaagcgggaaattgtg |
| | LTCTVSGVSLPDYGVSWIRQPP | atgacccagtcacccgccactcttagcctttcacccggtgagcgc |
| | GKGLEWIGVIWGSETTYYSSSL | gcaaccctgtcttgcagagcctcccaagacatctcaaaatacctt |
| | KSRVTISKDNSKNQVSLKLSSVT | aattggtatcaacagaagcccggacaggctcctcgccttctgatct |
| | AADTAVYYCAKHYYYGGSYAM | accacaccagccggctccattctggaatccctgccaggttcagcg |
| | DYWGQGTLVTVSSTTTPAPRPP | gtagcggatctgggaccgactacaccctcactatcagctcactgc |
| | TPAPTIASQPLSLRPEACRPAAG | agccagaggacttcgctgtctatttctgtcagcaagggaacaccct |
| | GAVHTRGLDFACDIYIWAPLAGT | gccctacacctttggacagggcaccaagctcgagattaaaggtg |
| | CGVLLLSLVITLYCKRGRKKLLYI | gaggtggcagcggaggaggtgggtccggcggtggaggaagcc |
| | FKQPFMRPVQTTQEEDGCSCR | aggtccaactccaagaaagcggaccgggtcttgtgaagccatca |
| | FPEEEEGGCELRVKFSRSADAP | gaaactctttcactgacttgtactgtgagcggagtgtctctccccgat |
| | AYKQGQNQLYNELNLGRREEY | tacggggtgtcttggatcagacagccaccggggaagggtctgga |
| | DVLDKRRGRDPEMGGKPRRKN | atggattggagtgatttggggctctgagactacttactactcttcatc |
| | PQEGLYNELQKDKMAEAYSEIG | cctcaagtcacgcgtcaccatctcaaaggacaactctaagaatc |
| | MKGERRRGKGHDGLYQGLSTA | aggtgtcactgaaactgtcatctgtgaccgcagccgacaccgcc |
| | TKDTYDALHMQALPPR (SEQ ID | gtgtactattgcgctaagcattactattatggcgggagctacgcaat |
| | NO: 109) | ggattactggggacagggtactctggtcaccgtgtccagcaccac |
| | | taccccagcaccgaggccacccaccccggctcctaccatcgcct |
| | | cccagcctctgtccctgcgtccggaggcatgtagacccgcagctg |
| | | gtggggccgtgcatacccggggtcttgacttcgcctgcgatatcta |
| | | catttgggcccctctggctggtacttgcggggtcctgctgctttcact |
| | | cgtgatcactctttactgtaagcgcggtcggaagaagctgctgtac |
| | | atctttaagcaacccttcatgaggcctgtgcagactactcaagagg |
| | | aggacggctgttcatgccggttcccagaggaggaggaaggcgg |
| | | ctgcgaactgcgcgtgaaattcagccgcagcgcagatgctccag |
| | | cctacaagcaggggcagaaccagctctacaacgaactcaatctt |
| | | ggtcggagagaggagtacgacgtgctggacaagcggagagg |
| | | acgggacccagaaatgggcgggaagccgcgcagaaagaatc |
| | | cccaagagggcctgtacaacgagctccaaaaggataagatgg |
| | | cagaagcctatagcgagattggtatgaaaggggaacgcagaa |
| | | gaggcaaaggccacgacggactgtaccagggactcagcaccg |
| | | ccaccaaggacacctatgacgctcttcacatgcaggccctgccg |
| | | cctcgg (SEQ ID NO: 110) |
| ERₘᵤₜ.Furin- | MALPVTALLLPLALLLHAARPR | Atggccctccctgtcaccgccctgctgcttccgctggctcttctgctc |
| CAR19 = Alt5 | SSLALSLTADQMVSALLDAEPPI | cacgccgctcggccccggtcgtcgttggcactttccctgactgccg |
| | LYSEYDPTRPFSEASMMGLLTN | accagatggtgtccgcccttctggacgccgagcctccaattctgta |
| | LADRELVHMINWAKRVPGFVDL | ctcggagtacgatccgactcgcccgttctccgaagccagcatgat |
| | ALHDQVHLLECAWMEILMIGLV | gggcctgttgactaacctggcggaccgcgagttggtgcacatgat |
| | WRSMEHPGKLLFAPNLLLDRNQ | taactgggctaagcgggtgccgggcttcgtggacctggccctgca |
| | GKCVEGGVEIFDMLLATSSRFR | cgaccaagtgcacctcctggaatgcgcctggatggaaatcctcat |
| | MMNLQGEEFVCLKSIILLNSGVY | gatcggcctcgtgtggagatccatggagcatcccggaaagctcct |
| | TFLSSTLKSLEEKDHIHRVLDKIT | gtttgcacccaacctcctgcttgatcgcaaccagggaaaatgcgt |
| | DTLIHLMAKAGLTLQQQHQRLA | ggaagggggtgtcgagattttcgacatgctgctcgccacctcttcc |
| | QLLLILSHIRHMSSKRMEHLYSM | cggttccggatgatgaatctgcagggagaagagttcgtgtgtctga |
| | KCKNVVPLSDLLLEMLDAHRLG | agtcaatcatcctgctgaactccggggtctataccttcctgagctcg |
| | TGAEDPRPSRKRRSLGDVGEIV | accctcaagtcactggaggaaaaagaccacatccatcgcgtgct |
| | MTQSPATLSLSPGERATLSCRA | cgataagatcaccgacacccttatccatctcatggcgaaggctgg |
| | SQDISKYLNWYQQKPGQAPRLL | actgaccctgcaacagcagcaccagaggctggcccagttgctg |
| | IYHTSRLHSGIPARFSGSGSGTD | ctgattctgagccacatccggcacatgtcgtccaagaggatggaa |
| | YTLTISSLQPEDFAVYFCQQGNT | cacctgtacagcatgaagtgcaagaacgtcgtgcctctgtccgat |
| | LPYTFGQGTKLEIKGGGGSGGG | ctgctcctggaaatgctggacgcgcacagactcggaaccggcg |
| | GSGGGGSQVQLQESGPGLVKP | cggaagacccccggccctccaggaagcgaaggtccctcggag |
| | SETLSLTCTVSGVSLPDYGVSWI | acgtgggtgaaattgtgatgacccagtcacccgccactcttagcct |
| | RQPPGKGLEWIGVIWGSETTYY | ttcacccggtgagcgcgcaaccctgtcttgcagagcctcccaaga |
| | SSSLKSRVTISKDNSKNQVSLKL | catctcaaaataccttaattggtatcaacagaagcccggacaggc |
| | SSVTAADTAVYYCAKHYYYGGS | tcctcgccttctgatctaccacaccagccggctccattctggaatcc |
| | YAMDYWGQGTLVTVSSTTTPAP | ctgccaggttcagcggtagcggatctgggaccgactacaccctc |
| | RPPTPAPTIASQPLSLRPEACRP | actatcagctcactgcagccagaggacttcgctgtctatttctgtca |
| | AAGGAVHTRGLDFACDIYIWAPL | gcaagggaacaccctgccctacacctttggacagggcaccaag |
| | AGTCGVLLLSLVITLYCKRGRKK | ctcgagattaaaggtggaggtggcagcggaggaggtgggtccg |
| | LLYIFKQPFMRPVQTTQEEDGC | gcggtggaggaagccaggtccaactccaagaaagcggaccg |
| | SCRFPEEEEGGCELRVKFSRSA | ggtcttgtgaagccatcagaaactctttcactgacttgtactgtgag |
| | DAPAYKQGQNQLYNELNLGRR | cggagtgtctctccccgattacggggtgtcttggatcagacagcca |
| | EEYDVLDKRRGRDPEMGGKPR | ccggggaagggtctggaatggattggagtgatttggggctctgag |
| | RKNPQEGLYNELQKDKMAEAY | actacttactactcttcatccctcaagtcacgcgtcaccatctcaaa |
| | SEIGMKGERRRGKGHDGLYQG | ggacaactctaagaatcaggtgtcactgaaactgtcatctgtgac |
| | LSTATKDTYDALHMQALPPR | cgcagccgacaccgccgtgtactattgcgctaagcattactattat |
| | (SEQ ID NO: 111) | ggcgggagctacgcaatggattactggggacagggtactctggt |
| | | caccgtgtccagcaccactaccccagcaccgaggccacccacc |
| | | ccggctcctaccatcgcctcccagcctctgtccctgcgtccggagg |
| | | catgtagacccgcagctggtggggccgtgcatacccggggtcttg |
| | | acttcgcctgcgatatctacatttgggcccctctggctggtacttgcg |
| | | gggtcctgctgctttcactcgtgatcactctttactgtaagcgcggtc |
| | | ggaagaagctgctgtacatctttaagcaacccttcatgaggcctgt |
| | | gcagactactcaagaggaggacggctgttcatgccggttcccag |
| | | aggaggaggaaggcggctgcgaactgcgcgtgaaattcagcc |
| | | gcagcgcagatgctccagcctacaagcaggggcagaaccagc |
| | | tctacaacgaactcaatcttggtcggagagaggagtacgacgtg |
| | | ctggacaagcggagaggacgggacccagaaatgggcgggaa |
| | | gccgcgcagaaagaatccccaagagggcctgtacaacgagct |
| | | ccaaaaggataagatggcagaagcctatagcgagattggtatg |
| | | aaaggggaacgcagaagaggcaaaggccacgacggactgta |
| | | ccagggactcagcaccgccaccaaggacacctatgacgctcttc |
| | | acatgcaggccctgccgcctcgg (SEQ ID NO: 112) |
| ERₘᵤₜ.Furin- | MALPVTALLLPLALLLHAARPR | Atggccctccctgtcaccgccctgctgcttccgctggctcttctgctc |
| CAR19 = Alt6 | SSLALSLTADQMVSALLDAEPPI | cacgccgctcggccccggtcgtcgttggcactttccctgactgccg |
| | LYSEYDPTRPFSEASMMGLLTN | accagatggtgtccgcccttctggacgccgagcctccaattctgta |
| | LADRELVHMINWAKRVPGFVDL | ctcggagtacgatccgactcgcccgttctccgaagccagcatgat |
| | ALHDQVHLLECAWMEILMIGLV | gggcctgttgactaacctggcggaccgcgagttggtgcacatgat |
| | WRSMEHPGKLLFAPNLLLDRNQ | taactgggctaagcgggtgccgggcttcgtggacctggccctgca |
| | GKCVEGGVEIFDMLLATSSRFR | cgaccaagtgcacctcctggaatgcgcctggatggaaatcctcat |
| | MMNLQGEEFVCLKSIILLNSGVY | gatcggcctcgtgtggagatccatggagcatcccggaaagctcct |
| | TFLSSTLKSLEEKDHIHRVLDKIT | gtttgcacccaacctcctgcttgatcgcaaccagggaaaatgcgt |
| | DTLIHLMAKAGLTLQQQHQRLA | ggaagggggtgtcgagattttcgacatgctgctcgccacctcttcc |
| | QLLLILSHIRHMSSKRMEHLYSM | cggttccggatgatgaatctgcagggagaagagttcgtgtgtctga |
| | KCKNVVPLSDLLLEMLDAHRLG | agtcaatcatcctgctgaactccggggtctataccttcctgagctcg |
| | TGAEDPRPSRKRRSLGGEIVMT | accctcaagtcactggaggaaaaagaccacatccatcgcgtgct |
| | QSPATLSLSPGERATLSCRASQ | cgataagatcaccgacacccttatccatctcatggcgaaggctgg |
| | DISKYLNWYQQKPGQAPRLLIY | actgaccctgcaacagcagcaccagaggctggcccagttgctg |
| | HTSRLHSGIPARFSGSGSGTDY | ctgattctgagccacatccggcacatgtcgtccaagaggatggaa |
| | TLTISSLQPEDFAVYFCQQGNTL | cacctgtacagcatgaagtgcaagaacgtcgtgcctctgtccgat |
| | PYTFGQGTKLEIKGGGGSGGG | ctgctcctggaaatgctggacgcgcacagactcggcacaggtgc |
| | GSGGGGSQVQLQESGPGLVKP | cgaggaccctcggccaagccgcaaaaggaggtcacttggcgg |
| | SETLSLTCTVSGVSLPDYGVSWI | cgaaattgtgatgacccagtcacccgccactcttagcctttcaccc |
| | RQPPGKGLEWIGVIWGSETTYY | ggtgagcgcgcaaccctgtcttgcagagcctcccaagacatctc |
| | SSSLKSRVTISKDNSKNQVSLKL | aaaataccttaattggtatcaacagaagcccggacaggctcctcg |
| | SSVTAADTAVYYCAKHYYYGGS | ccttctgatctaccacaccagccggctccattctggaatccctgcc |
| | YAMDYWGQGTLVTVSSTTTPAP | aggttcagcggtagcggatctgggaccgactacaccctcactatc |
| | RPPTPAPTIASQPLSLRPEACRP | agctcactgcagccagaggacttcgctgtctatttctgtcagcaag |
| | AAGGAVHTRGLDFACDIYIWAPL | ggaacaccctgccctacacctttggacagggcaccaagctcga |
| | AGTCGVLLLSLVITLYCKRGRKK | gattaaaggtggaggtggcagcggaggaggtgggtccggcggt |
| | LLYIFKQPFMRPVQTTQEEDGC | ggaggaagccaggtccaactccaagaaagcggaccgggtctt |
| | SCRFPEEEEGGCELRVKFSRSA | gtgaagccatcagaaactctttcactgacttgtactgtgagcggag |
| | DAPAYKQGQNQLYNELNLGRR | tgtctctccccgattacggggtgtcttggatcagacagccaccggg |
| | EEYDVLDKRRGRDPEMGGKPR | gaagggtctggaatggattggagtgatttggggctctgagactact |
| | RKNPQEGLYNELQKDKMAEAY | tactactcttcatccctcaagtcacgcgtcaccatctcaaaggaca |
| | SEIGMKGERRRGKGHDGLYQG | actctaagaatcaggtgtcactgaaactgtcatctgtgaccgcagc |
| | LSTATKDTYDALHMQALPPR | cgacaccgccgtgtactattgcgctaagcattactattatggcggg |
| | (SEQ ID NO: 113) | agctacgcaatggattactggggacagggtactctggtcaccgtg |
| | | tccagcaccactaccccagcaccgaggccacccaccccggctc |
| | | ctaccatcgcctcccagcctctgtccctgcgtccggaggcatgtag |
| | | acccgcagctggtggggccgtgcatacccggggtcttgacttcgc |
| | | ctgcgatatctacatttgggcccctctggctggtacttgcggggtcct |
| | | gctgctttcactcgtgatcactctttactgtaagcgcggtcggaaga |
| | | agctgctgtacatctttaagcaacccttcatgaggcctgtgcagact |
| | | actcaagaggaggacggctgttcatgccggttcccagaggagg |
| | | aggaaggcggctgcgaactgcgcgtgaaattcagccgcagcgc |
| | | agatgctccagcctacaagcaggggcagaaccagctctacaac |
| | | gaactcaatcttggtcggagagaggagtacgacgtgctggacaa |
| | | gcggagaggacgggacccagaaatgggcgggaagccgcgc |
| | | agaaagaatccccaagagggcctgtacaacgagctccaaaag |
| | | gataagatggcagaagcctatagcgagattggtatgaaagggg |
| | | aacgcagaagaggcaaaggccacgacggactgtaccaggga |
| | | ctcagcaccgccaccaaggacacctatgacgctcttcacatgca |
| | | ggccctgccgcctcgg (SEQ ID NO: 114) |
| ERₘᵤₜ.Furin- | MALPVTALLLPLALLLHAARPR | Atggccctccctgtcaccgccctgctgcttccgctggctcttctgctc |
| CAR19 = Alt7 | SSLALSLTADQMVSALLDAEPPI | cacgccgctcggccccggtcgtcgttggcactttccctgactgccg |
| | LYSEYDPTRPFSEASMMGLLTN | accagatggtgtccgcccttctggacgccgagcctccaattctgta |
| | LADRELVHMINWAKRVPGFVDL | ctcggagtacgatccgactcgcccgttctccgaagccagcatgat |
| | ALHDQVHLLECAWMEILMIGLV | gggcctgttgactaacctggcggaccgcgagttggtgcacatgat |
| | WRSMEHPGKLLFAPNLLLDRNQ | taactgggctaagcgggtgccgggcttcgtggacctggccctgca |
| | GKCVEGGVEIFDMLLATSSRFR | cgaccaagtgcacctcctggaatgcgcctggatggaaatcctcat |
| | MMNLQGEEFVCLKSIILLNSGVY | gatcggcctcgtgtggagatccatggagcatcccggaaagctcct |
| | TFLSSTLKSLEEKDHIHRVLDKIT | gtttgcacccaacctcctgcttgatcgcaaccagggaaaatgcgt |
| | DTLIHLMAKAGLTLQQQHQRLA | ggaagggggtgtcgagattttcgacatgctgctcgccacctcttcc |
| | QLLLILSHIRHMSSKRMEHLYSM | cggttccggatgatgaatctgcagggagaagagttcgtgtgtctga |
| | KCKNVVPLSDLLLEMLDAHRLG | agtcaatcatcctgctgaactccggggtctataccttcctgagctcg |
| | TGAEDPRPSRKRRSLGEIVMTQ | accctcaagtcactggaggaaaaagaccacatccatcgcgtgct |
| | SPATLSLSPGERATLSCRASQDI | cgataagatcaccgacacccttatccatctcatggcgaaggctgg |
| | SKYLNWYQQKPGQAPRLLIYHT | actgaccctgcaacagcagcaccagaggctggcccagttgctg |
| | SRLHSGIPARFSGSGSGTDYTL | ctgattctgagccacatccggcacatgtcgtccaagaggatggaa |
| | TISSLQPEDFAVYFCQQGNTLPY | cacctgtacagcatgaagtgcaagaacgtcgtgcctctgtccgat |
| | TFGQGTKLEIKGGGGSGGGGS | ctgctcctggaaatgctggacgcgcacagactcggaaccggag |
| | GGGGSQVQLQESGPGLVKPSE | cagaagatcccagaccaagccggaaaaggcggtccctgggtg |
| | TLSLTCTVSGVSLPDYGVSWIR | aaattgtgatgacccagtcacccgccactcttagcctttcacccggt |
| | QPPGKGLEWIGVIWGSETTYYS | gagcgcgcaaccctgtcttgcagagcctcccaagacatctcaaa |
| | SSLKSRVTISKDNSKNQVSLKLS | ataccttaattggtatcaacagaagcccggacaggctcctcgcctt |
| | SVTAADTAVYYCAKHYYYGGSY | ctgatctaccacaccagccggctccattctggaatccctgccaggt |
| | AMDYWGQGTLVTVSSTTTPAP | tcagcggtagcggatctgggaccgactacaccctcactatcagct |
| | RPPTPAPTIASQPLSLRPEACRP | cactgcagccagaggacttcgctgtctatttctgtcagcaagggaa |
| | AAGGAVHTRGLDFACDIYIWAPL | caccctgccctacacctttggacagggcaccaagctcgagatta |
| | AGTCGVLLLSLVITLYCKRGRKK | aaggtggaggtggcagcggaggaggtgggtccggcggtggag |
| | LLYIFKQPFMRPVQTTQEEDGC | gaagccaggtccaactccaagaaagcggaccgggtcttgtgaa |
| | SCRFPEEEEGGCELRVKFSRSA | gccatcagaaactctttcactgacttgtactgtgagcggagtgtctct |
| | DAPAYKQGQNQLYNELNLGRR | ccccgattacggggtgtcttggatcagacagccaccggggaagg |
| | EEYDVLDKRRGRDPEMGGKPR | gtctggaatggattggagtgatttggggctctgagactacttactact |
| | RKNPQEGLYNELQKDKMAEAY | cttcatccctcaagtcacgcgtcaccatctcaaaggacaactctaa |
| | SEIGMKGERRRGKGHDGLYQG | gaatcaggtgtcactgaaactgtcatctgtgaccgcagccgacac |
| | LSTATKDTYDALHMQALPPR | cgccgtgtactattgcgctaagcattactattatggcgggagctac |
| | (SEQ ID NO: 115) | gcaatggattactggggacagggtactctggtcaccgtgtccagc |
| | | accactaccccagcaccgaggccacccaccccggctcctacca |
| | | tcgcctcccagcctctgtccctgcgtccggaggcatgtagacccg |
| | | cagctggtggggccgtgcatacccggggtcttgacttcgcctgcg |
| | | atatctacatttgggcccctctggctggtacttgcggggtcctgctgc |
| | | tttcactcgtgatcactctttactgtaagcgcggtcggaagaagctg |
| | | ctgtacatctttaagcaacccttcatgaggcctgtgcagactactca |
| | | agaggaggacggctgttcatgccggttcccagaggaggaggaa |
| | | ggcggctgcgaactgcgcgtgaaattcagccgcagcgcagatg |
| | | ctccagcctacaagcaggggcagaaccagctctacaacgaact |
| | | caatcttggtcggagagaggagtacgacgtgctggacaagcgg |
| | | agaggacgggacccagaaatgggcgggaagccgcgcagaa |
| | | agaatccccaagagggcctgtacaacgagctccaaaaggata |
| | | agatggcagaagcctatagcgagattggtatgaaaggggaacg |
| | | cagaagaggcaaaggccacgacggactgtaccagggactca |
| | | gcaccgccaccaaggacacctatgacgctcttcacatgcaggcc |
| | | ctgccgcctcgg (SEQ ID NO: 116) |

[0941] General Methods

[0942] The following general materials and methods were used for the assays described in Examples 1-13.

[0943] Generation of CAR Constructs

[0944] The scFvs used in the CAR constructs that were assessed in Examples 3 were independently synthesized based on an anti-CD19 scFv sequence described above. The scFv was cloned in a heavy-to-light chain direction, with a flexible linker connecting the VH and VL domains (e.g., GGGGSGGGGSGGGGSGGGGS (SEQ ID NO: 29)), into a vector backbone containing the CD8 hinge region along with the 4-1BB molecule and the CD3zeta molecule. To this, an N-terminal furin cleavage site fused to a destabilization domain was added upstream of the scFv. The proteins used in the furin-degron constructs that were assessed in Examples 4-5 were independently synthesized based on publicly available sequence data. To this, an N-terminal furin cleavage site fused to a destabilization domain was added upstream of the protein.

[0945] Cell Lines and Cell Transduction

[0946] Jurkat cells were obtained from the ATCC and maintained in media according to supplier's recommendations. Jurkat cell lines were transduced by spinoculation with lentiviral supernatant from 293T cells transfected with pELPS using the protein-furin domain regulated plasmid DNA.

[0947] Cancer Cells

[0948] NALM6 and K562 cell lines were obtained from the ATCC and maintained in media according to supplier's recommendations. To produce a bioluminescent model for T cell killing assays, all cells were transduced with a luciferase lentiviral construct and kept under antibiotic selection.

[0949] Flow Cytometry

[0950] Cells were isolated from in vitro culture, washed once in PBS supplemented with 0.5% bovine serum albumin, and stained on ice using either biotinylated Protein L followed by incubated with a fluorochrome-conjugated streptavidin reagent or an antibody recognizing the given target antigen. In all analyses, the population of interest was gated based on forward vs side scatter characteristics, followed by singlet gating, and live cells were gated. Flow cytometry was performed on a four laser Fortessa (Becton-Dickinson).

[0951] Compound Treatments

[0952] In all instances, either 4-OHT or Shield1 was resuspended in ethanol. Trimethoprim (TMP) was resuspended in DMSO. In all instances where concentrations not indicated, compounds were added for 24 hours in total prior to analysis by flow cytometry. 3 μM 4-OHT (ERα), 1 μM Shield1 (FKBP), or 100 μM TMP (ecDHFR) was used.

[0953] Killing Assay

[0954] In brief, luciferase transduced target cell lines were incubated at the indicated ratios with effector CD19CAR or CD19CAR-FurON T cells for 18 hours. Remaining luciferase activity was measured by adding Bright-Glo (Promega) on a luminescence reader (Envision). Percentage killing was calculated using negative controls.

[0955] Cytokine Secretion

[0956] Effector and target cells were incubated at a 3:1 ratio in RPMI containing 10% FBS for 18 hours. Supernatant was analysed by 3-plex array according the manufacturer's instructions (Invitrogen).

### Example 2: Furin is the Most Highly Expressed Proprotein Convertase in Primary Human T Cells

[0957] Literature sources indicated that FURIN (FUR; PACE; PCSK3; SPC1) has a broad expression profile (Seidah, et al Nature Reviews Drug Discovery 11, 367-383 (May 2012)). The expression of the proprotein convertase family members was analysed by qRT-PCR. RNA was harvested from normal donor T cells on days 0, 4, and 11 following stimulation with anti-CD3/anti-CD28 activation beads. An additional group was supplemented with 100U/mL IL-2 during culture and RNA was harvested on day 11. These data demonstrate that following activation with anti-CD3/anti-CD28 beads, FURIN mRNA is expressed more highly than other members of the proprotein convertase family (FIG. 1).

### Example 3: Expression of Cd19 CAR Controlled by Compound Addition

[0958] Jurkat T cells were transduced with a furin degron domain (FKBP_{FD}, ERα_{FD}, or DHFR_{FD}) fused to an anti-CD19 scFv CAR construct followed by treatment with the corresponding compound. FKBP_{FD} transduced cells treated with 1 μM Shield1. ERα_{FD} transduced cells treated with 1 μM Bazedoxifene. DHFR_{FD} transduced cells treated with 1 mM TMP. Expression of the anti-CD19 scFv is inducible in the presence of compound (FIG. 2). Black=UTD; Gray=construct, no compound; White=construct, compound. These data demonstrate that multiple degron domains, when combined with a furin cleavage domain, result in strict compound-dependent regulation of CAR 19 expression.

### Example 4: Kinetics of CAR Expression in Jurkat Cells Following Compound Addition

[0959] Jurkat T cells were transduced with the indicated furin degron domain (FKBP_{FD} or ERα_{FD}) fused to an anti-CD19 scFv CAR construct. These cells were treated with either 1 μM Shield1 or 1 μM 4-OHT for the time indicated and CAR expression was determined by FACS. These data demonstrate that induction of expression using a furin degron CAR 19 occurs rapidly following compound addition and is stable throughout the period of compound treatment (FIG. 3).

### Example 5: Compound Inducible CAR Expression in Primary Human T Cells

[0960] Primary human T cells were transduced with ERα furin degron domain (ERα_{FD} domain) fused to an anti-CD19 scFv CAR construct. 100 U/mL IL-2 was added on day 9 following activation with anti-CD3/CD28 stimulation beads. Bazedoxifene was added on day 10, and CAR expression was determined by FACS on day 11. These data demonstrate that a furin degron domain (e.g., ERα_{FD} domain) can regulate CAR 19 expression in a compound-dependent manner in primary human T cells (FIG. 4), and that stabilization is enhanced in the presence of IL-2 in vitro (FIG. 4).

### Example 6: Kinetics of CAR Expression Following Compound Washout in Primary T Cells

[0961] Primary human T cells were transduced with the indicated furin degron domain (FKBP_{FD} or ERα_{FD}) fused to an anti-CD19 scFv CAR construct. 100 U/mL IL-2 was added on day 9 following activation with anti-CD3/CD28 stimulation beads. Bazedoxifene was added on day 10, and T cells were frozen on day 11. T cells were thawed, extensively washed, and placed in culture for the times indicated followed by determination of CAR expression by FACS. These data demonstrate that removal of compound results in a reduction of CAR 19 expression using a furin degron domain (FIG. 5).

### Example 7: Multiple ER-Alpha Targeting Drugs Stabilize ER-Alpha Furon CARTS

[0962] Jurkat T cells were transduced with the ERα_{FD} degradation domain fused to an anti-CD19 scFv CAR construct followed by treatment with the indicated compounds for 24 hours. Compounds were used at 10 μM for 4-OHT, 1 μM for Bazedoxifene, or 1 μM for Lasofoxifene. These data demonstrate that multiple ER-alpha targeting compounds can induce CAR 19 expression using an estrogen receptor-based furin degron (FurON) system (FIG. 6).

### Example 8: Dose Response with Bazedoxifene in Human T Cells

[0963] Primary human T cells were transduced with ERα_{FD} furin degron domain fused to an anti-CD19 scFv CAR construct or the parental CD19 CAR construct. 100 U/mL IL-2 was added on day 9 following activation with anti-CD3/CD28 stimulation beads, and T cells were frozen on day 11. T cells were thawed and placed in culture for 48 hrs with Bazedoxifene at the concentrations indicated. CAR expression was determined by FACS. These data demonstrate that physiologically relevant concentrations of Bazedoxifene can stabilize furin degron CAR 19 expression in a level that is similar to parental CAR 19 (FIG. 7).

### Example 9: Compound-Dependent Target Specific Cell Killing by ER-Alpha Furon CART

[0964] Primary human T cells were transduced with ERα_{FD} furin degron domain fused to an anti-CD19 scFv CAR construct or the parental CD19 CAR construct. 100 U/mL IL-2 and Bazedoxifene were added on day 9 following activation with anti-CD3/CD28 stimulation beads, and T cells were frozen on day 11. T cells were thawed and incubated for 20 hours with the indicated luciferized cell line targets, K562 (CD19-) or NALM6 (CD19+). Percent killing was determined by analysis of remaining luciferase activity. These data demonstrate that CAR19 with an estrogen receptor-based furin degron domain specifically kills CD19+ tumor cells in a manner that is compound-dependent and is noninferior to the parental CAR19 (FIG. 8).

### Example 10: Compound-Dependent Target Specific Cell Killing by FKBP Furon CART

[0965] Primary human T cells were transduced with FKBP_{FD} furin degron domain fused to an anti-CD19 scFv CAR construct or the parental CD19 CAR construct. 100U/mL IL-2 and Shield1 were added on day 9 following activation with anti-CD3/CD28 stimulation beads, and T cells were frozen on day 11. T cells were thawed and incubated for 20 hours with the indicated luciferized cell line targets, K562 (CD19−) or NALM6 (CD19+). Percent killing was determined by analysis of remaining luciferase activity. These data demonstrate that CAR19 with an FKBP-based furin degron domain specifically kills CD19+ tumor cells in a manner that is compound-dependent and is noninferior to the parental CAR19 (FIG. 9).

### Example 11: Compound-Dependent Cytokine Production of ER-Alpha Furon CART

[0966] Primary human T cells were transduced with ERα_{FD} furin degron domain fused to an anti-CD19 scFv CAR construct or the parental CD19 CAR construct. 100 U/mL IL-2 and Bazedoxifene were added on day 9 following activation with anti-CD3/CD28 stimulation beads, and T cells were frozen on day 11. T cells were thawed and incubated with the indicated cell line targets for 20 hours. Supernatants were harvested and analyzed by cytokine bead array. These data demonstrate that CAR19 with an estrogen receptor-based furin degron domain specifically produces cytokines in the presence of CD19+ tumor cells in a manner that is compound-dependent and is noninferior to the parental CAR19 (FIG. 10).

### Example 12: Compound-Dependent Proliferation of ER-Alpha Furon CART

[0967] Primary human T cells were transduced with ERα_{FD} furin degron domain fused to an anti-CD19 scFv CAR construct or the parental CD19 CAR construct. 100 U/mL IL-2 and Bazedoxifene were added on day 9 following activation with anti-CD3/CD28 stimulation beads, and T cells were frozen on day 11. T cells were thawed and incubated with the indicated cell line targets for 4 days. T cell FurON-CAR numbers were analyzed by FACS. These data demonstrate that CAR19 with an estrogen receptor-based furin degron domain specifically proliferates in the presence of CD19+ tumor cells in a manner that is compound-dependent and is noninferior to the parental CAR19 (FIG. 11).

### Example 13: Materials and Methods for Examples 14-26

[0968] The following general materials and methods were used for the assays described in Examples 14-26.

[0969] FurON Constructs

[0970] In some embodiments, the fusion protein described herein includes a furin degron (FurON) domain, which comprises two components: a degron or degradation domain, which is a mutated protein domain unable to acquire a proper conformation in the absence of a small molecule ligand, and a furin cleavage site. The furin degron domain can be fused to a protein of interest that is expressed in the endoplasmic reticulum. The N- and/or C-termini of the protein of interest can be used as site of fusion, provided that the furin degron domain faces the lumen of the endoplasmic reticulum. The protein of interest can be either a membrane protein (regardless of the number of transmembrane domains) or a soluble protein. The orientation of the furin cleavage site relative to the degron domain should be such that the cleavage results in the separation of the furin degron domain and protein of interest. In the absence of the small molecule ligand or stabilization compound, the furin degron domain leads to the destabilization or degradation of the entire fusion protein. In the presence of the small molecule ligand or stabilization compound, the fusion protein is spared from degradation. The furin degron domain is mutated such that the affinity to its natural endogenous ligand is abolished; the affinity to the small molecule ligand or stabilization compound is preserved; and protein instability is conferred when the small molecule is absent.

[0971] Several constructs comprising different mutations and different furin cleavage sites within the furin degron domain were created and fused to the N-terminus of the anti-CD19 scFV CAR or anti-CD123 scFV CAR. Regardless the orientation of the scFV heavy and light chains, the fusion of the furin degron domain occurs between the signal peptide leader and the scFV. The mutated protein selected within the furin degron domain was a truncated version of the estrogen receptor alpha. The small molecule ligands chosen to stabilize the furin degron domain belong to the family of selective estrogen receptor modulators or downregulators.

[0972] The efficacy of the furin degron domain at destabilizing or stabilizing the CAR structure was assessed, in the absence or presence of a small molecule ligand. The potency of the CART cell effector function, when the furin degron domain was fused, was also evaluated in the absence or presence of a small molecule ligand, and compared to the parental CAR19 construct. Cells were normalized to the same percentage of CAR expressing cells, with the addition of untransduced T cells (UTDs) from the same donor T cell expansion. The normalized populations were then used in co-cultured assays to measure CAR-mediated cytolytic function, cytokine production, and proliferation.

[0973] Generation of FurON CAR Constructs

[0974] The scFvs used in the CAR constructs assessed in the examples were independently synthesized based on anti-CD19 or anti-CD123 scFV sequences described above. The scFVs were cloned in a light-to-heavy chain direction (anti-CD19) or heavy-to-light chain direction (anti-CD123), with a flexible linker connecting the VH and VL domains (e.g., GGGGSGGGGSGGGGSGGGGS, SEQ ID NO: 29), into a vector backbone containing the CD8 hinge region along with the 4-1BB molecule and the CD3zeta molecule. To this, an N-terminal furin cleavage site fused to a destabilization domain was added upstream of the scFV. All constructs are generated in a lentiviral vector. Sequences of various FurON CAR constructs and components thereof are provided in Table 23.

TABLE 23
Sequences of FurON CAR constructs and components thereof

| | Amino acid sequence | DNA sequence |
|---|---|---|
| ER1 WT | SLALSLTADQMVSALLDAEPPI | tcgttggcactttccctgactgccgaccagatggtgtccgcc |
| (305aa-549aa) | LYSEYDPTRPFSEASMMGLLT | cttctggacgccgagcctccaattctgtactcggagtacgat |
| | NLADRELVHMINWAKRVPGF | ccgactcgcccgttctccgaagccagcatgatgggcctgtt |
| | VDLTLHDQVHLLECAWLEILMI | gactaacctggcggaccgcgagttggtgcacatgattaac |
| | GLVWRSMEHPGKLLFAPNLLL | tgggctaagcgggtgccgggcttcgtggacctgactctgc |
| | DRNQGKCVEGMVEIFDMLLA | acgaccaagtgcacctcctggaatgcgcctggctggaaa |
| | TSSRFRMMNLQGEEFVCLKSI | tcctcatgatcggcctcgtgtggagatccatggagcatccc |
| | ILLNSGVYTFLSSTLKSLEEKD | ggaaagctcctgtttgcacccaacctcctgcttgatcgcaa |
| | HIHRVLDKITDTLIHLMAKAGLT | ccagggaaaatgcgtggaagggatggtcgagattttcga |
| | LQQQHQRLAQLLLILSHIRHM | catgctgctcgccacctcttcccggttccggatgatgaatct |
| | SNKGMEHLYSMKCKNVVPLY | gcagggagaagagttcgtgtgtctgaagtcaatcatcctgc |
| | DLLLEMLDAHRL (SEQ ID NO: | tgaactccggggtctataccttcctgagctcgaccctcaagt |
| | 970) | cactggaggaaaaagaccacatccatcgcgtgctcgata |
| | | agatcaccgacacccttatccatctcatggcgaaggctgg |
| | | actgaccctgcaacagcagcaccagaggctggcccagtt |
| | | gctgctgattctgagccacatccggcacatgtcgaacaag |
| | | gggatggaacacctgtacagcatgaagtgcaagaacgtc |
| | | gtgcctctgtacgatctgctcctggaaatgctggacgcgca |
| | | cagactc (SEQ ID NO: 971) |
| ERmut1 (6 | SLALSLTADQMVSALLDAEPPI | tcgttggcactttccctgactgccgaccagatggtgtccgcc |
| mutations) | LYSEYDPTRPFSEASMMGLLT | cttctggacgccgagcctccaattctgtactcggagtacgat |
| | NLADRELVHMINWAKRVPGF | ccgactcgcccgttctccgaagccagcatgatgggcctgtt |
| | VDLALHDQVHLLECAWMEILM | gactaacctggcggaccgcgagttggtgcacatgattaac |
| | IGLVWRSMEHPGKLLFAPNLL | tgggctaagcgggtgccgggcttcgtggacctggccctgc |
| | LDRNQGKCVEGGVEIFDMLLA | acgaccaagtgcacctcctggaatgcgcctggatggaaa |
| | TSSRFRMMNLQGEEFVCLKSI | tcctcatgatcggcctcgtgtggagatccatggagcatccc |
| | ILLNSGVYTFLSSTLKSLEEKD | ggaaagctcctgtttgcacccaacctcctgcttgatcgcaa |
| | HIHRVLDKITDTLIHLMAKAGLT | ccagggaaaatgcgtggaagggggtgtcgagattttcga |
| | LQQQHQRLAQLLLILSHIRHM | catgctgctcgccacctcttcccggttccggatgatgaatct |
| | SSKRMEHLYSMKCKNVVPLS | gcagggagaagagttcgtgtgtctgaagtcaatcatcctgc |
| | DLLLEMLDAHRL (SEQ ID NO: | tgaactccggggtctataccttcctgagctcgaccctcaagt |
| | 58) | cactggaggaaaaagaccacatccatcgcgtgctcgata |
| | | agatcaccgacacccttatccatctcatggcgaaggctgg |
| | | actgaccctgcaacagcagcaccagaggctggcccagtt |
| | | gctgctgattctgagccacatccggcacatgtcgtccaaga |
| | | ggatggaacacctgtacagcatgaagtgcaagaacgtcg |
| | | tgcctctgtccgatctgctcctggaaatgctggacgcgcac |
| | | agactc (SEQ ID NO: 1110) |
| ERmut2 (4 | SLALSLTADQMVSALLDAEPPI | tcgttggcactttccctgactgccgaccagatggtgtccgcc |
| mutations) | LYSEYDPTRPFSEASMMGLLT | cttctggacgccgagcctccaattctgtactcggagtacgat |
| | NLADRELVHMINWAKRVPGF | ccgactcgcccgttctccgaagccagcatgatgggcctgtt |
| | VDLTLHDQVHLLECAWMEILM | gactaacctggcggaccgcgagttggtgcacatgattaac |
| | IGLVWRSMEHPGKLLFAPNLL | tgggctaagcgggtgccgggcttcgtggacctgaccctgc |
| | LDRNQGKCVEGGVEIFDMLLA | acgaccaagtgcacctcctggaatgcgcctggatggaaa |
| | TSSRFRMMNLQGEEFVCLKSI | tcctcatgatcggcctcgtgtggagatccatggagcatccc |
| | ILLNSGVYTFLSSTLKSLEEKD | ggaaagctcctgtttgcacccaacctcctgcttgatcgcaa |
| | HIHRVLDKITDTLIHLMAKAGLT | ccagggaaaatgcgtggaagggggtgtcgagattttcga |
| | LQQQHQRLAQLLLILSHIRHM | catgctgctcgccacctcttcccggttccggatgatgaatct |
| | SNKRMEHLYSMKCKNVVPLS | gcagggagaagagttcgtgtgtctgaagtcaatcatcctgc |
| | DLLLEMLDAHRL (SEQ ID NO: | tgaactccggggtctataccttcctgagctcgaccctcaagt |
| | 121) | cactggaggaaaaagaccacatccatcgcgtgctcgata |
| | | agatcaccgacacccttatccatctcatggcgaaggctgg |
| | | actgaccctgcaacagcagcaccagaggctggcccagtt |
| | | gctgctgattctgagccacatccggcacatgtcgaacaag |
| | | aggatggaacacctgtacagcatgaagtgcaagaacgtc |
| | | gtgcctctgtccgatctgctcctggaaatgctggacgcgca |
| | | cagactc (SEQ ID NO: 122) |
| Furin cleavage site1 | RTKR (SEQ ID NO: 123) | cgtactaaaaga (SEQ ID NO: 1112) |
| Furin cleavage site2 | GTGAEDPRPSRKRRSLGDVG | ggaaccggcgcggaagacccccggccctccaggaagc |
| | (SEQ ID NO: 125) | gaaggtccctcggagacgtgggt (SEQ ID NO: 126) |
| Furin cleavage site3 | GTGAEDPRPSRKRR (SEQ ID | ggaaccggcgcggaagacccccggccctccaggaagc |
| | NO: 127) | gaagg (SEQ ID NO: 128) |
| Furin cleavage site4 | LQWLEQQVAKRRTKR | ctgcaatggctggagcagcaggtggcgaagcggagaac |
| | (SEQ ID NO: 129) | taagcgg (SEQ ID NO: 130) |
| Furin cleavage site5 | GTGAEDPRPSRKRRSLGG | ggcacaggtgccgaggaccctcggccaagccgcaaaa |
| | (SEQ ID NO: 131) | ggaggtcacttggcggc (SEQ ID NO: 132) |
| Furin cleavage site6 | GTGAEDPRPSRKRRSLG | ggaaccggagcagaagatcccagaccaagccggaaa |
| | (SEQ ID NO: 133) | aggcggtccctgggt (SEQ ID NO: 134) |
| Furin cleavage site7 | SLNLTESHNSRKKR | agtctcaatttgactgagtcacacaattccaggaagaaaa |
| | (SEQ ID NO: 135) | gg (SEQ ID NO: 136) |
| Furin cleavage site8 | CKINGYPKRGRKRR | tgcaagatcaacggctaccctaagaggggcagaaagcg |
| | (SEQ ID NO: 137) | gcgg (SEQ ID NO: 138) |
| Leader sequence/ | MALPVTALLLPLALLLHAARP | atggccctccctgtcaccgccctgctgcttccgctggctcttc |
| Signal peptide (SP) | (SEQ ID NO: 139) | tgctccacgccgctcggccc (SEQ ID NO: 140) |
| SP-Linker 1- | MALPVTALLLPLALLLHAARPR | atggccctccctgtcaccgccctgctgcttccgctggctcttc |
| ERmut1-Furin | SSLALSLTADQMVSALLDAEP | tgctccacgccgctcggccccggtcgtcgttggcactttccc |
| cleavage site 1- | PILYSEYDPTRPFSEASMMGL | tgactgccgaccagatggtgtccgcccttctggacgccga |
| CD19 CAR1 | LTNLADRELVHMINWAKRVPG | gcctccaattctgtactcggagtacgatccgactcgcccgtt |
| | FVDLALHDQVHLLECAWMEIL | ctccgaagccagcatgatgggcctgttgactaacctggcg |
| | MIGLVWRSMEHPGKLLFAPNL | gaccgcgagttggtgcacatgattaactgggctaagcggg |
| | LLDRNQGKCVEGGVEIFDMLL | tgccgggcttcgtggacctggccctgcacgaccaagtgca |
| | ATSSRFRMMNLQGEEFVCLK | cctcctggaatgcgcctggatggaaatcctcatgatcggcc |
| | SIILLNSGVYTFLSSTLKSLEEK | tcgtgtggagatccatggagcatcccggaaagctcctgttt |
| | DHIHRVLDKITDTLIHLMAKAG | gcacccaacctcctgcttgatcgcaaccagggaaaatgc |
| | LTLQQQHQRLAQLLLILSHIRH | gtggaagggggtgtcgagattttcgacatgctgctcgccac |
| | MSSKRMEHLYSMKCKNVVPL | ctcttcccggttccggatgatgaatctgcagggagaagagt |
| | SDLLLEMLDAHRLRTKREIVM | tcgtgtgtctgaagtcaatcatcctgctgaactccggggtct |
| | TQSPATLSLSPGERATLSCRA | ataccttcctgagctcgaccctcaagtcactggaggaaaa |
| | SQDISKYLNWYQQKPGQAPR | agaccacatccatcgcgtgctcgataagatcaccgacac |
| | LLIYHTSRLHSGIPARFSGSGS | ccttatccatctcatggcgaaggctggactgaccctgcaac |
| | GTDYTLTISSLQPEDFAVYFC | agcagcaccagaggctggcccagttgctgctgattctgag |
| | QQGNTLPYTFGQGTKLEIKGG | ccacatccggcacatgtcgtccaagaggatggaacacct |
| | GGSGGGGSGGGGSQVQLQE | gtacagcatgaagtgcaagaacgtcgtgcctctgtccgat |
| | SGPGLVKPSETLSLTCTVSGV | ctgctcctggaaatgctggacgcgcacagactccgtacta |
| | SLPDYGVSWIRQPPGKGLEN | aaagagaaattgtgatgacccagtcacccgccactcttag |
| | GVIWGSETTYYSSSLKSRVTIS | cctttcacccggtgagcgcgcaaccctgtcttgcagagcct |
| | KDNSKNQVSLKLSSVTAADTA | cccaagacatctcaaaataccttaattggtatcaacagaa |
| | VYYCAKHYYYGGSYAMDYW | gcccggacaggctcctcgccttctgatctaccacaccagc |
| | GQGTLVTVSSTTTPAPRPPTP | cggctccattctggaatccctgccaggttcagcggtagcgg |
| | APTIASQPLSLRPEACRPAAG | atctgggaccgactacaccctcactatcagctcactgcag |
| | GAVHTRGLDFACDIYIWAPLA | ccagaggacttcgctgtctatttctgtcagcaagggaacac |
| | GTCGVLLLSLVITLYCKRGRKK | cctgccctacacctttggacagggcaccaagctcgagatt |
| | LLYIFKQPFMRPVQTTQEEDG | aaaggtggaggtggcagcggaggaggtgggtccggcg |
| | CSCRFPEEEEGGCELRVKFS | gtggaggaagccaggtccaactccaagaaagcggacc |
| | RSADAPAYKQGQNQLYNELN | gggtcttgtgaagccatcagaaactctttcactgacttgtact |
| | LGRREEYDVLDKRRGRDPEM | gtgagcggagtgtctctccccgattacggggtgtcttggatc |
| | GGKPRRKNPQEGLYNELQKD | agacagccaccggggaagggtctggaatggattggagt |
| | KMAEAYSEIGMKGERRRGKG | gatttggggctctgagactacttactactcttcatccctcaag |
| | HDGLYQGLSTATKDTYDALH | tcacgcgtcaccatctcaaaggacaactctaagaatcag |
| | MQALPPR (SEQ ID NO: 141) | gtgtcactgaaactgtcatctgtgaccgcagccgacaccg |
| | | ccgtgtactattgcgctaagcattactattatggcgggagct |
| | | acgcaatggattactggggacagggtactctggtcaccgt |
| | | gtccagcaccactaccccagcaccgaggccacccaccc |
| | | cggctcctaccatcgcctcccagcctctgtccctgcgtccg |
| | | gaggcatgtagacccgcagctggtggggccgtgcatacc |
| | | cggggtcttgacttcgcctgcgatatctacatttgggcccctc |
| | | tggctggtacttgcggggtcctgctgctttcactcgtgatcac |
| | | tctttactgtaagcgcggtcggaagaagctgctgtacatcttt |
| | | aagcaacccttcatgaggcctgtgcagactactcaagag |
| | | gaggacggctgttcatgccggttcccagaggaggaggaa |
| | | ggcggctgcgaactgcgcgtgaaattcagccgcagcgc |
| | | agatgctccagcctacaagcaggggcagaaccagctct |
| | | acaacgaactcaatcttggtcggagagaggagtacgacg |
| | | tgctggacaagcggagaggacgggacccagaaatggg |
| | | cgggaagccgcgcagaaagaatccccaagagggcctg |
| | | tacaacgagctccaaaaggataagatggcagaagcctat |
| | | agcgagattggtatgaaaggggaacgcagaagaggca |
| | | aaggccacgacggactgtaccagggactcagcaccgcc |
| | | accaaggacacctatgacgctcttcacatgcaggccctgc |
| | | cgcctcgg (SEQ ID NO: 142) |
| SP-Linker 1- | MALPVTALLLPLALLLHAARPR | atggccctccctgtcaccgccctgctgcttccgctggctcttc |
| ERmut1-Furin | SSLALSLTADQMVSALLDAEP | tgctccacgccgctcggccccggtcgtcgttggcactttccc |
| cleavage site 2- | PILYSEYDPTRPFSEASMMGL | tgactgccgaccagatggtgtccgcccttctggacgccga |
| CD19 CAR1 | LTNLADRELVHMINWAKRVPG | gcctccaattctgtactcggagtacgatccgactcgcccgtt |
| (construct 106) | FVDLALHDQVHLLECAWMEIL | ctccgaagccagcatgatgggcctgttgactaacctggcg |
| | MIGLVWRSMEHPGKLLFAPNL | gaccgcgagttggtgcacatgattaactgggctaagcggg |
| | LLDRNQGKCVEGGVEIFDMLL | tgccgggcttcgtggacctggccctgcacgaccaagtgca |
| | ATSSRFRMMNLQGEEFVCLK | cctcctggaatgcgcctggatggaaatcctcatgatcggcc |
| | SIILLNSGVYTFLSSTLKSLEEK | tcgtgtggagatccatggagcatcccggaaagctcctgttt |
| | DHIHRVLDKITDTLIHLMAKAG | gcacccaacctcctgcttgatcgcaaccagggaaaatgc |
| | LTLQQQHQRLAQLLLILSHIRH | gtggaagggggtgtcgagattttcgacatgctgctcgccac |
| | MSSKRMEHLYSMKCKNVVPL | ctcttcccggttccggatgatgaatctgcagggagaagagt |
| | SDLLLEMLDAHRLGTGAEDPR | tcgtgtgtctgaagtcaatcatcctgctgaactccggggtct |
| | PSRKRRSLGDVGEIVMTQSPA | ataccttcctgagctcgaccctcaagtcactggaggaaaa |
| | TLSLSPGERATLSCRASQDIS | agaccacatccatcgcgtgctcgataagatcaccgacac |
| | KYLNWYQQKPGQAPRLLIYHT | ccttatccatctcatggcgaaggctggactgaccctgcaac |
| | SRLHSGIPARFSGSGSGTDYT | agcagcaccagaggctggcccagttgctgctgattctgag |
| | LTISSLQPEDFAVYFCQQGNT | ccacatccggcacatgtcgtccaagaggatggaacacct |
| | LPYTFGQGTKLEIKGGGGSG | gtacagcatgaagtgcaagaacgtcgtgcctctgtccgat |
| | GGGSGGGGSQVQLQESGPG | ctgctcctggaaatgctggacgcgcacagactcggaacc |
| | LVKPSETLSLTCTVSGVSLPD | ggcgcggaagacccccggccctccaggaagcgaaggt |
| | YGVSWIRQPPGKGLEWIGVIW | ccctcggagacgtgggtgaaattgtgatgacccagtcacc |
| | GSETTYYSSSLKSRVTISKDN | cgccactcttagcctttcacccggtgagcgcgcaaccctgt |
| | SKNQVSLKLSSVTAADTAVYY | cttgcagagcctcccaagacatctcaaaataccttaattgg |
| | CAKHYYYGGSYAMDYWGQG | tatcaacagaagcccggacaggctcctcgccttctgatcta |
| | TLVTVSSTTTPAPRPPTPAPTI | ccacaccagccggctccattctggaatccctgccaggttc |
| | ASQPLSLRPEACRPAAGGAV | agcggtagcggatctgggaccgactacaccctcactatca |
| | HTRGLDFACDIYIWAPLAGTC | gctcactgcagccagaggacttcgctgtctatttctgtcagc |
| | GVLLLSLVITLYCKRGRKKLLYI | aagggaacaccctgccctacacctttggacagggcacca |
| | FKQPFMRPVQTTQEEDGCSC | agctcgagattaaaggtggaggtggcagcggaggaggt |
| | RFPEEEEGGCELRVKFSRSA | gggtccggcggtggaggaagccaggtccaactccaaga |
| | DAPAYKQGQNQLYNELNLGR | aagcggaccgggtcttgtgaagccatcagaaactctttca |
| | REEYDVLDKRRGRDPEMGGK | ctgacttgtactgtgagcggagtgtctctccccgattacggg |
| | PRRKNPQEGLYNELQKDKMA | gtgtcttggatcagacagccaccggggaagggtctggaat |
| | EAYSEIGMKGERRRGKGHDG | ggattggagtgatttggggctctgagactacttactactcttc |
| | LYQGLSTATKDTYDALHMQAL | atccctcaagtcacgcgtcaccatctcaaaggacaactct |
| | PPR (SEQ ID NO: 143) | aagaatcaggtgtcactgaaactgtcatctgtgaccgcag |
| | | ccgacaccgccgtgtactattgcgctaagcattactattatg |
| | | gcgggagctacgcaatggattactggggacagggtactct |
| | | ggtcaccgtgtccagcaccactaccccagcaccgaggcc |
| | | acccaccccggctcctaccatcgcctcccagcctctgtccc |
| | | tgcgtccggaggcatgtagacccgcagctggtggggccg |
| | | tgcatacccggggtcttgacttcgcctgcgatatctacatttg |
| | | ggcccctctggctggtacttgcggggtcctgctgctttcactc |
| | | gtgatcactctttactgtaagcgcggtcggaagaagctgct |
| | | gtacatctttaagcaacccttcatgaggcctgtgcagacta |
| | | ctcaagaggaggacggctgttcatgccggttcccagagg |
| | | aggaggaaggcggctgcgaactgcgcgtgaaattcagc |
| | | cgcagcgcagatgctccagcctacaagcaggggcaga |
| | | accagctctacaacgaactcaatcttggtcggagagagg |
| | | agtacgacgtgctggacaagcggagaggacgggaccc |
| | | agaaatgggcgggaagccgcgcagaaagaatccccaa |
| | | gagggcctgtacaacgagctccaaaaggataagatggc |
| | | agaagcctatagcgagattggtatgaaaggggaacgca |
| | | gaagaggcaaaggccacgacggactgtaccagggact |
| | | cagcaccgccaccaaggacacctatgacgctcttcacat |
| | | gcaggccctgccgcctcgg (SEQ ID NO: 144) |
| SP-Linker 1- | MALPVTALLLPLALLLHAARPR | atggccctccctgtcaccgccctgctgcttccgctggctcttc |
| ERmut1-Furin | SSLALSLTADQMVSALLDAEP | tgctccacgccgctcggccccggtcgtcgttggcactttccc |
| cleavage site 2- | PILYSEYDPTRPFSEASMMGL | tgactgccgaccagatggtgtccgcccttctggacgccga |
| CD19 CAR2 | LTNLADRELVHMINWAKRVPG | gcctccaattctgtactcggagtacgatccgactcgcccgtt |
| | FVDLALHDQVHLLECAWMEIL | ctccgaagccagcatgatgggcctgttgactaacctggcg |
| | MIGLVWRSMEHPGKLLFAPNL | gaccgcgagttggtgcacatgattaactgggctaagcggg |
| | LLDRNQGKCVEGGVEIFDMLL | tgccgggcttcgtggacctggccctgcacgaccaagtgca |
| | ATSSRFRMMNLQGEEFVCLK | cctcctggaatgcgcctggatggaaatcctcatgatcggcc |
| | SIILLNSGVYTFLSSTLKSLEEK | tcgtgtggagatccatggagcatcccggaaagctcctgttt |
| | DHIHRVLDKITDTLIHLMAKAG | gcacccaacctcctgcttgatcgcaaccagggaaaatgc |
| | LTLQQQHQRLAQLLLILSHIRH | gtggaagggggtgtcgagattttcgacatgctgctcgccac |
| | MSSKRMEHLYSMKCKNVVPL | ctcttcccggttccggatgatgaatctgcagggagaagagt |
| | SDLLLEMLDAHRLGTGAEDPR | tcgtgtgtctgaagtcaatcatcctgctgaactccggggtct |
| | PSRKRRSLGDVGEIVMTQSPA | ataccttcctgagctcgaccctcaagtcactggaggaaaa |
| | TLSLSPGERATLSCRASQDIS | agaccacatccatcgcgtgctcgataagatcaccgacac |
| | KYLNWYQQKPGQAPRLLIYHT | ccttatccatctcatggcgaaggctggactgaccctgcaac |
| | SRLHSGIPARFSGSGSGTDYT | agcagcaccagaggctggcccagttgctgctgattctgag |
| | LTISSLQPEDFAVYFCQQGNT | ccacatccggcacatgtcgtccaagaggatggaacacct |
| | LPYTFGQGTKLEIKGGGGSG | gtacagcatgaagtgcaagaacgtcgtgcctctgtccgat |
| | GGGSGGGGSQVQLQESGPG | ctgctcctggaaatgctggacgcgcacagactcggaacc |
| | LVKPSETLSLTCTVSGVSLPD | ggcgcggaagacccccggccctccaggaagcgaaggt |
| | YGVSWIRQPPGKGLEWIGVIW | ccctcggagacgtgggtgaaattgtgatgacccagtcacc |
| | GSETTYYSSSLKSRVTISKDN | cgccactcttagcctttcacccggtgagcgcgcaaccctgt |
| | SKNQVSLKLSSVTAADTAVYY | cttgcagagcctcccaagacatctcaaaataccttaattgg |
| | CAKHYYYGGSYAMDYWGQG | tatcaacagaagcccggacaggctcctcgccttctgatcta |
| | TLVTVSSTTTPAPRPPTPAPTI | ccacaccagccggctccattctggaatccctgccaggttc |
| | ASQPLSLRPEACRPAAGGAV | agcggtagcggatctgggaccgactacaccctcactatca |
| | HTRGLDFACDIYIWAPLAGTC | gctcactgcagccagaggacttcgctgtctatttctgtcagc |
| | GVLLLSLVITLYCKRGRKKLLYI | aagggaacaccctgccctacacctttggacagggcacca |
| | FKQPFMRPVQTTQEEDGCSC | agctcgagattaaaggtggaggtggcagcggaggaggt |
| | RFPEEEEGGCELRVKFSRSA | gggtccggcggtggaggaagccaggtccaactccaaga |
| | DAPAYQQGQNQLYNELNLGR | aagcggaccgggtcttgtgaagccatcagaaactctttca |
| | REEYDVLDKRRGRDPEMGGK | ctgacttgtactgtgagcggagtgtctctccccgattacggg |
| | PRRKNPQEGLYNELQKDKMA | gtgtcttggatcagacagccaccggggaagggtctggaat |
| | EAYSEIGMKGERRRGKGHDG | ggattggagtgatttggggctctgagactacttactactcttc |
| | LYQGLSTATKDTYDALHMQAL | atccctcaagtcacgcgtcaccatctcaaaggacaactct |
| | PPR (SEQ ID NO: 145) | aagaatcaggtgtcactgaaactgtcatctgtgaccgcag |
| | | ccgacaccgccgtgtactattgcgctaagcattactattatg |
| | | gcgggagctacgcaatggattactggggacagggtactct |
| | | ggtcaccgtgtccagcaccactaccccagcaccgaggcc |
| | | acccaccccggctcctaccatcgcctcccagcctctgtccc |
| | | tgcgtccggaggcatgtagacccgcagctggtggggccg |
| | | tgcatacccggggtcttgacttcgcctgcgatatctacatttg |
| | | ggcccctctggctggtacttgcggggtcctgctgctttcactc |
| | | gtgatcactctttactgtaagcgcggtcggaagaagctgct |
| | | gtacatctttaagcaacccttcatgaggcctgtgcagacta |
| | | ctcaagaggaggacggctgttcatgccggttcccagagg |
| | | aggaggaaggcggctgcgaactgcgcgtgaaattcagc |
| | | cgcagcgcagatgctccagcctaccagcaggggcagaa |
| | | ccagctctacaacgaactcaatcttggtcggagagagga |
| | | gtacgacgtgctggacaagcggagaggacgggaccca |
| | | gaaatgggcgggaagccgcgcagaaagaatccccaag |
| | | agggcctgtacaacgagctccaaaaggataagatggca |
| | | gaagcctatagcgagattggtatgaaaggggaacgcag |
| | | aagaggcaaaggccacgacggactgtaccagggactc |
| | | agcaccgccaccaaggacacctatgacgctcttcacatg |
| | | caggccctgccgcctcgg (SEQ ID NO: 146) |
| SP-Linker 1- | MALPVTALLLPLALLLHAARPR | atggccctccctgtcaccgccctgctgcttccgctggctcttc |
| ERmut1-Furin | SSLALSLTADQMVSALLDAEP | tgctccacgccgctcggccccggtcgtcgttggcactttccc |
| cleavage site 3- | PILYSEYDPTRPFSEASMMGL | tgactgccgaccagatggtgtccgcccttctggacgccga |
| CD19 CAR1 | LTNLADRELVHMINWAKRVPG | gcctccaattctgtactcggagtacgatccgactcgcccgtt |
| (construct 103) | FVDLALHDQVHLLECAWMEIL | ctccgaagccagcatgatgggcctgttgactaacctggcg |
| | MIGLVWRSMEHPGKLLFAPNL | gaccgcgagttggtgcacatgattaactgggctaagcggg |
| | LLDRNQGKCVEGGVEIFDMLL | tgccgggcttcgtggacctggccctgcacgaccaagtgca |
| | ATSSRFRMMNLQGEEFVCLK | cctcctggaatgcgcctggatggaaatcctcatgatcggcc |
| | SIILLNSGVYTFLSSTLKSLEEK | tcgtgtggagatccatggagcatcccggaaagctcctgttt |
| | DHIHRVLDKITDTLIHLMAKAG | gcacccaacctcctgcttgatcgcaaccagggaaaatgc |
| | LTLQQQHQRLAQLLLILSHIRH | gtggaagggggtgtcgagattttcgacatgctgctcgccac |
| | MSSKRMEHLYSMKCKNVVPL | ctcttcccggttccggatgatgaatctgcagggagaagagt |
| | SDLLLEMLDAHRLGTGAEDPR | tcgtgtgtctgaagtcaatcatcctgctgaactccggggtct |
| | PSRKRREIVMTQSPATLSLSP | ataccttcctgagctcgaccctcaagtcactggaggaaaa |
| | GERATLSCRASQDISKYLNWY | agaccacatccatcgcgtgctcgataagatcaccgacac |
| | QQKPGQAPRLLIYHTSRLHSG | ccttatccatctcatggcgaaggctggactgaccctgcaac |
| | IPARFSGSGSGTDYTLTISSLQ | agcagcaccagaggctggcccagttgctgctgattctgag |
| | PEDFAVYFCQQGNTLPYTFG | ccacatccggcacatgtcgtccaagaggatggaacacct |
| | QGTKLEIKGGGGSGGGGSGG | gtacagcatgaagtgcaagaacgtcgtgcctctgtccgat |
| | GGSQVQLQESGPGLVKPSE | ctgctcctggaaatgctggacgcgcacagactcgggacg |
| | TLSLTCTVSGVSLPDYGVS | ggagctgaagatccacgacccagcagaaagcgacggg |
| | WIRQPPGKGLEWIGVIWGS | aaattgtgatgacccagtcacccgccactcttagcctttcac |
| | ETTYYSSSLKSRVTISKDNS | ccggtgagcgcgcaaccctgtcttgcagagcctcccaag |
| | KNQVSLKLSSVTAADTAVY | acatctcaaaataccttaattggtatcaacagaagcccgg |
| | YCAKHYYYGGSYAMDYW | acaggctcctcgccttctgatctaccacaccagccggctcc |
| | GQGTLVTVSSTTTPAPRPP | attctggaatccctgccaggttcagcggtagcggatctggg |
| | TPAPTIASQPLSLRPEACRP | accgactacaccctcactatcagctcactgcagccagag |
| | AAGGAVHTRGLDFACDIYI | gacttcgctgtctatttctgtcagcaagggaacaccctgccc |
| | WAPLAGTCGVLLLSLVITLY | tacacctttggacagggcaccaagctcgagattaaaggtg |
| | CKRGRKKLLYIFKQPFMRP | gaggtggcagcggaggaggtgggtccggcggtggagg |
| | VQTTQEEDGCSCRFPEEE | aagccaggtccaactccaagaaagcggaccgggtcttgt |
| | EGGCELRVKFSRSADAPA | gaagccatcagaaactctttcactgacttgtactgtgagcg |
| | YKQGQNQLYNELNLGRRE | gagtgtctctccccgattacggggtgtcttggatcagacag |
| | EYDVLDKRRGRDPEMGGK | ccaccggggaagggtctggaatggattggagtgatttggg |
| | PRRKNPQEGLYNELQKDK | gctctgagactacttactactcttcatccctcaagtcacgcgt |
| | MAEAYSEIGMKGERRRGK | caccatctcaaaggacaactctaagaatcaggtgtcactg |
| | GHDGLYQGLSTATKDTYD | aaactgtcatctgtgaccgcagccgacaccgccgtgtact |
| | ALHMQALPPR | attgcgctaagcattactattatggcgggagctacgcaatg |
| | (SEQ ID NO: 147) | gattactggggacagggtactctggtcaccgtgtccagca |
| | | ccactaccccagcaccgaggccacccaccccggctccta |
| | | ccatcgcctcccagcctctgtccctgcgtccggaggcatgt |
| | | agacccgcagctggtggggccgtgcatacccggggtctt |
| | | gacttcgcctgcgatatctacatttgggcccctctggctggta |
| | | cttgcggggtcctgctgctttcactcgtgatcactctttactgta |
| | | agcgcggtcggaagaagctgctgtacatctttaagcaacc |
| | | cttcatgaggcctgtgcagactactcaagaggaggacgg |
| | | ctgttcatgccggttcccagaggaggaggaaggcggctg |
| | | cgaactgcgcgtgaaattcagccgcagcgcagatgctcc |
| | | agcctacaagcaggggcagaaccagctctacaacgaa |
| | | ctcaatcttggtcggagagaggagtacgacgtgctggaca |
| | | agcggagaggacgggacccagaaatgggcgggaagc |
| | | cgcgcagaaagaatccccaagagggcctgtacaacga |
| | | gctccaaaaggataagatggcagaagcctatagcgaga |
| | | ttggtatgaaaggggaacgcagaagaggcaaaggcca |
| | | cgacggactgtaccagggactcagcaccgccaccaagg |
| | | acacctatgacgctcttcacatgcaggccctgccgcctcg |
| | | g (SEQ ID NO: 148) |
| SP-Linker 1- | MALPVTALLLPLALLLHAARPR | atggccctccctgtcaccgccctgctgcttccgctggctcttc |
| ERmut1-Furin | SSLALSLTADQMVSALLDAEP | tgctccacgccgctcggccccggtcgtcgttggcactttccc |
| cleavage site 3- | PILYSEYDPTRPFSEASMMGL | tgactgccgaccagatggtgtccgcccttctggacgccga |
| CD19 CAR2 | LTNLADRELVHMINWAKRVPG | gcctccaattctgtactcggagtacgatccgactcgcccgtt |
| | FVDLALHDQVHLLECAWMEIL | ctccgaagccagcatgatgggcctgttgactaacctggcg |
| | MIGLVWRSMEHPGKLLFAPNL | gaccgcgagttggtgcacatgattaactgggctaagcggg |
| | LLDRNQGKCVEGGVEIFDMLL | tgccgggcttcgtggacctggccctgcacgaccaagtgca |
| | ATSSRFRMMNLQGEEFVCLK | cctcctggaatgcgcctggatggaaatcctcatgatcggcc |
| | SIILLNSGVYTFLSSTLKSLEEK | tcgtgtggagatccatggagcatcccggaaagctcctgttt |
| | DHIHRVLDKITDTLIHLMAKAG | gcacccaacctcctgcttgatcgcaaccagggaaaatgc |
| | LTLQQQHQRLAQLLLILSHIRH | gtggaagggggtgtcgagattttcgacatgctgctcgccac |
| | MSSKRMEHLYSMKCKNVVPL | ctcttcccggttccggatgatgaatctgcagggagaagagt |
| | SDLLLEMLDAHRLGTGAEDPR | tcgtgtgtctgaagtcaatcatcctgctgaactccggggtct |
| | PSRKRREIVMTQSPATLSLSP | ataccttcctgagctcgaccctcaagtcactggaggaaaa |
| | GERATLSCRASQDISKYLNWY | agaccacatccatcgcgtgctcgataagatcaccgacac |
| | QQKPGQAPRLLIYHTSRLHSG | ccttatccatctcatggcgaaggctggactgaccctgcaac |
| | IPARFSGSGSGTDYTLTISSLQ | agcagcaccagaggctggcccagttgctgctgattctgag |
| | PEDFAVYFCQQGNTLPYTFG | ccacatccggcacatgtcgtccaagaggatggaacacct |
| | QGTKLEIKGGGGSGGGGSGG | gtacagcatgaagtgcaagaacgtcgtgcctctgtccgat |
| | GGSQVQLQESGPGLVKPSET | ctgctcctggaaatgctggacgcgcacagactcgggacg |
| | LSLTCTVSGVSLPDYGVSWIR | ggagctgaagatccacgacccagcagaaagcgacggg |
| | QPPGKGLEWIGVIWGSETTYY | aaattgtgatgacccagtcacccgccactcttagcctttcac |
| | SSSLKSRVTISKDNSKNQVSL | ccggtgagcgcgcaaccctgtcttgcagagcctcccaag |
| | KLSSVTAADTAVYYCAKHYYY | acatctcaaaataccttaattggtatcaacagaagcccgg |
| | GGSYAMDYWGQGTLVTVSST | acaggctcctcgccttctgatctaccacaccagccggctcc |
| | TTPAPRPPTPAPTIASQPLSLR | attctggaatccctgccaggttcagcggtagcggatctggg |
| | PEACRPAAGGAVHTRGLDFA | accgactacaccctcactatcagctcactgcagccagag |
| | CDIYIWAPLAGTCGVLLLSLVIT | gacttcgctgtctatttctgtcagcaagggaacaccctgccc |
| | LYCKRGRKKLLYIFKQPFMRP | tacacctttggacagggcaccaagctcgagattaaaggtg |
| | VQTTQEEDGCSCRFPEEEEG | gaggtggcagcggaggaggtgggtccggcggtggagg |
| | GCELRVKFSRSADAPAYQQG | aagccaggtccaactccaagaaagcggaccgggtcttgt |
| | QNQLYNELNLGRREEYDVLD | gaagccatcagaaactctttcactgacttgtactgtgagcg |
| | KRRGRDPEMGGKPRRKNPQ | gagtgtctctccccgattacggggtgtcttggatcagacag |
| | EGLYNELQKDKMAEAYSEIGM | ccaccggggaagggtctggaatggattggagtgatttggg |
| | KGERRRGKGHDGLYQGLSTA | gctctgagactacttactactcttcatccctcaagtcacgcgt |
| | TKDTYDALHMQALPPR (SEQ | caccatctcaaaggacaactctaagaatcaggtgtcactg |
| | ID NO: 149) | aaactgtcatctgtgaccgcagccgacaccgccgtgtact |
| | | attgcgctaagcattactattatggcgggagctacgcaatg |
| | | gattactggggacagggtactctggtcaccgtgtccagca |
| | | ccactaccccagcaccgaggccacccaccccggctccta |
| | | ccatcgcctcccagcctctgtccctgcgtccggaggcatgt |
| | | agacccgcagctggtggggccgtgcatacccggggtctt |
| | | gacttcgcctgcgatatctacatttgggcccctctggctggta |
| | | cttgcggggtcctgctgctttcactcgtgatcactctttactgta |
| | | agcgcggtcggaagaagctgctgtacatctttaagcaacc |
| | | cttcatgaggcctgtgcagactactcaagaggaggacgg |
| | | ctgttcatgccggttcccagaggaggaggaaggcggctg |
| | | cgaactgcgcgtgaaattcagccgcagcgcagatgctcc |
| | | agcctaccagcaggggcagaaccagctctacaacgaac |
| | | tcaatcttggtcggagagaggagtacgacgtgctggaca |
| | | agcggagaggacgggacccagaaatgggcgggaagc |
| | | cgcgcagaaagaatccccaagagggcctgtacaacga |
| | | gctccaaaaggataagatggcagaagcctatagcgaga |
| | | ttggtatgaaaggggaacgcagaagaggcaaaggcca |
| | | cgacggactgtaccagggactcagcaccgccaccaagg |
| | | acacctatgacgctcttcacatgcaggccctgccgcctcg |
| | | g (SEQ ID NO: 150) |
| SP-Linker 1- | MALPVTALLLPLALLLHAARPR | atggccctccctgtcaccgccctgctgcttccgctggctcttc |
| ERmut2-Furin | SSLALSLTADQMVSALLDAEP | tgctccacgccgctcggccccggtcgTcgttggcactttcc |
| cleavage site 1- | PILYSEYDPTRPFSEASMMGL | ctgactgccgaccagatggtgtccgcccttctggacgccg |
| CD19 CAR1 | LTNLADRELVHMINWAKRVPG | agcctccaattctgtactcggagtacgatccgactcgcccg |
| | FVDLTLHDQVHLLECAWMEIL | ttctccgaagccagcatgatgggcctgttgactaacctggc |
| | MIGLVWRSMEHPGKLLFAPNL | ggaccgcgagttggtgcacatgattaactgggctaagcgg |
| | LLDRNQGKCVEGGVEIFDMLL | gtgccgggcttcgtggacctgaccctgcacgaccaagtgc |
| | ATSSRFRMMNLOGEEFVCLK | acctcctggaatgcgcctggatggaaatcctcatgatcgg |
| | SIILLNSGVYTFLSSTLKSLEEK | cctcgtgtggagatccatggagcatcccggaaagctcctg |
| | DHIHRVLDKITDTLIHLMAKAG | tttgcacccaacctcctgcttgatcgcaaccagggaaaatg |
| | LTLQQQHQRLAQLLLILSHIRH | cgtggaagggggtgtcgagattttcgacatgctgctcgcca |
| | MSNKRMEHLYSMKCKNVVPL | cctcttcccggttccggatgatgaatctgcagggagaaga |
| | SDLLLEMLDAHRLRTKREIVM | gttcgtgtgtctgaagtcaatcatcctgctgaactccggggt |
| | TQSPATLSLSPGERATLSCRA | ctataccttcctgagctcgaccctcaagtcactggaggaaa |
| | SQDISKYLNWYQQKPGQAPR | aagaccacatccatcgcgtgctcgataagatcaccgaca |
| | LLIYHTSRLHSGIPARFSGSGS | cccttatccatctcatggcgaaggctggactgaccctgcaa |
| | GTDYTLTISSLQPEDFAVYFC | cagcagcaccagaggctggcccagttgctgctgattctga |
| | QQGNTLPYTFGQGTKLEIKGG | gccacatccggcacatgtcgaacaagaggatggaacac |
| | GGSGGGGSGGGGSQVQLQE | ctgtacagcatgaagtgcaagaacgtcgtgcctctgtccg |
| | SGPGLVKPSETLSLTCTVSGV | atctgctcctggaaatgctggacgcgcacagactccgtact |
| | SLPDYGVSWIRQPPGKGLEN | aaaagagaaattgtgatgacccagtcacccgccactctta |
| | GVIWGSETTYYSSSLKSRVTIS | gcctttcacccggtgagcgcgcaaccctgtcttgcagagc |
| | KDNSKNQVSLKLSSVTAADTA | ctcccaagacatctcaaaataccttaattggtatcaacaga |
| | VYYCAKHYYYGGSYAMDYW | agcccggacaggctcctcgccttctgatctaccacaccag |
| | GQGTLVTVSSTTTPAPRPPTP | ccggctccattctggaatccctgccaggttcagcggtagcg |
| | APTIASQPLSLRPEACRPAAG | gatctgggaccgactacaccctcactatcagctcactgca |
| | GAVHTRGLDFACDIYIWAPLA | gccagaggacttcgctgtctatttctgtcagcaagggaaca |
| | GTCGVLLLSLVITLYCKRGRKK | ccctgccctacacctttggacagggcaccaagctcgagat |
| | LLYIFKQPFMRPVQTTQEEDG | taaaggtggaggtggcagcggaggaggtgggtccggcg |
| | CSCRFPEEEEGGCELRVKFS | gtggaggaagccaggtccaactccaagaaagcggacc |
| | RSADAPAYKQGQNQLYNELN | gggtcttgtgaagccatcagaaactctttcactgacttgtact |
| | LGRREEYDVLDKRRGRDPEM | gtgagcggagtgtctctccccgattacggggtgtcttggatc |
| | GGKPRRKNPQEGLYNELQKD | agacagccaccggggaagggtctggaatggattggagt |
| | KMAEAYSEIGMKGERRRGKG | gatttggggctctgagactacttactactcttcatccctcaag |
| | HDGLYQGLSTATKDTYDALH | tcacgcgtcaccatctcaaaggacaactctaagaatcag |
| | MQALPPR (SEQ ID NO: 151) | gtgtcactgaaactgtcatctgtgaccgcagccgacaccg |
| | | ccgtgtactattgcgctaagcattactattatggcgggagct |
| | | acgcaatggattactggggacagggtactctggtcaccgt |
| | | gtccagcaccactaccccagcaccgaggccacccaccc |
| | | cggctcctaccatcgcctcccagcctctgtccctgcgtccg |
| | | gaggcatgtagacccgcagctggtggggccgtgcatacc |
| | | cggggtcttgacttcgcctgcgatatctacatttgggcccctc |
| | | tggctggtacttgcggggtcctgctgctttcactcgtgatcac |
| | | tctttactgtaagcgcggtcggaagaagctgctgtacatcttt |
| | | aagcaacccttcatgaggcctgtgcagactactcaagag |
| | | gaggacggctgttcatgccggttcccagaggaggaggaa |
| | | ggcggctgcgaactgcgcgtgaaattcagccgcagcgc |
| | | agatgctccagcctacaagcaggggcagaaccagctct |
| | | acaacgaactcaatcttggtcggagagaggagtacgacg |
| | | tgctggacaagcggagaggacgggacccagaaatggg |
| | | cgggaagccgcgcagaaagaatccccaagagggcctg |
| | | tacaacgagctccaaaaggataagatggcagaagcctat |
| | | agcgagattggtatgaaaggggaacgcagaagaggca |
| | | aaggccacgacggactgtaccagggactcagcaccgcc |
| | | accaaggacacctatgacgctcttcacatgcaggccctgc |
| | | cgcctcgg (SEQ ID NO: 152) |
| SP-Linker 1- | MALPVTALLLPLALLLHAARPR | atggccctccctgtcaccgccctgctgcttccgctggctcttc |
| ERmut2-Furin | SSLALSLTADQMVSALLDAEP | tgctccacgccgctcggccccggtcgtcgttggcactttccc |
| cleavage site 2- | PILYSEYDPTRPFSEASMMGL | tgactgccgaccagatggtgtccgcccttctggacgccga |
| CD19 CAR1 | LTNLADRELVHMINWAKRVPG | gcctccaattctgtactcggagtacgatccgactcgcccgtt |
| (construct 130) | FVDLTLHDQVHLLECAWMEIL | ctccgaagccagcatgatgggcctgttgactaacctggcg |
| | MIGLVWRSMEHPGKLLFAPNL | gaccgcgagttggtgcacatgattaactgggctaagcggg |
| | LLDRNQGKCVEGGVEIFDMLL | tgccgggcttcgtggacctgaccctgcacgaccaagtgca |
| | ATSSRFRMMNLQGEEFVCLK | cctcctggaatgcgcctggatggaaatcctcatgatcggcc |
| | SIILLNSGVYTFLSSTLKSLEEK | tcgtgtggagatccatggagcatcccggaaagctcctgttt |
| | DHIHRVLDKITDTLIHLMAKAG | gcacccaacctcctgcttgatcgcaaccagggaaaatgc |
| | LTLQQQHQRLAQLLLILSHIRH | gtggaagggggtgtcgagattttcgacatgctgctcgccac |
| | MSNKRMEHLYSMKCKNVVPL | ctcttcccggttccggatgatgaatctgcagggagaagagt |
| | SDLLLEMLDAHRLGTGAEDPR | tcgtgtgtctgaagtcaatcatcctgctgaactccggggtct |
| | PSRKRRSLGDVGEIVMTQSPA | ataccttcctgagctcgaccctcaagtcactggaggaaaa |
| | TLSLSPGERATLSCRASQDIS | agaccacatccatcgcgtgctcgataagatcaccgacac |
| | KYLNWYQQKPGQAPRLLIYHT | ccttatccatctcatggcgaaggctggactgaccctgcaac |
| | SRLHSGIPARFSGSGSGTDYT | agcagcaccagaggctggcccagttgctgctgattctgag |
| | LTISSLQPEDFAVYFCQQGNT | ccacatccggcacatgtcgaacaagaggatggaacacc |
| | LPYTFGQGTKLEIKGGGGSG | tgtacagcatgaagtgcaagaacgtcgtgcctctgtccgat |
| | GGGSGGGGSQVQLQESGPG | ctgctcctggaaatgctggacgcgcacagactcggaacc |
| | LVKPSETLSLTCTVSGVSLPD | ggcgcggaagacccccggccctccaggaagcgaaggt |
| | YGVSWIRQPPGKGLEWIGVIW | ccctcggagacgtgggtgaaattgtgatgacccagtcacc |
| | GSETTYYSSSLKSRVTISKDN | cgccactcttagcctttcacccggtgagcgcgcaaccctgt |
| | SKNQVSLKLSSVTAADTAVYY | cttgcagagcctcccaagacatctcaaaataccttaattgg |
| | CAKHYYYGGSYAMDYWGQG | tatcaacagaagcccggacaggctcctcgccttctgatcta |
| | TLVTVSSTTTPAPRPPTPAPTI | ccacaccagccggctccattctggaatccctgccaggttc |
| | ASQPLSLRPEACRPAAGGAV | agcggtagcggatctgggaccgactacaccctcactatca |
| | HTRGLDFACDIYIWAPLAGTC | gctcactgcagccagaggacttcgctgtctatttctgtcagc |
| | GVLLLSLVITLYCKRGRKKLLYI | aagggaacaccctgccctacacctttggacagggcacca |
| | FKQPFMRPVQTTQEEDGCSC | agctcgagattaaaggtggaggtggcagcggaggaggt |
| | RFPEEEEGGCELRVKFSRSA | gggtccggcggtggaggaagccaggtccaactccaaga |
| | DAPAYKQGQNQLYNELNLGR | aagcggaccgggtcttgtgaagccatcagaaactctttca |
| | REEYDVLDKRRGRDPEMGGK | ctgacttgtactgtgagcggagtgtctctccccgattacggg |
| | PRRKNPQEGLYNELQKDKMA | gtgtcttggatcagacagccaccggggaagggtctggaat |
| | EAYSEIGMKGERRRGKGHDG | ggattggagtgatttggggctctgagactacttactactcttc |
| | LYQGLSTATKDTYDALHMQAL | atccctcaagtcacgcgtcaccatctcaaaggacaactct |
| | PPR (SEQ ID NO: 153) | aagaatcaggtgtcactgaaactgtcatctgtgaccgcag |
| | | ccgacaccgccgtgtactattgcgctaagcattactattatg |
| | | gcgggagctacgcaatggattactggggacagggtactct |
| | | ggtcaccgtgtccagcaccactaccccagcaccgaggcc |
| | | acccaccccggctcctaccatcgcctcccagcctctgtccc |
| | | tgcgtccggaggcatgtagacccgcagctggtggggccg |
| | | tgcatacccggggtcttgacttcgcctgcgatatctacatttg |
| | | ggcccctctggctggtacttgcggggtcctgctgctttcactc |
| | | gtgatcactctttactgtaagcgcggtcggaagaagctgct |
| | | gtacatctttaagcaacccttcatgaggcctgtgcagacta |
| | | ctcaagaggaggacggctgttcatgccggttcccagagg |
| | | aggaggaaggcggctgcgaactgcgcgtgaaattcagc |
| | | cgcagcgcagatgctccagcctacaagcaggggcaga |
| | | accagctctacaacgaactcaatcttggtcggagagagg |
| | | agtacgacgtgctggacaagcggagaggacgggaccc |
| | | agaaatgggcgggaagccgcgcagaaagaatccccaa |
| | | gagggcctgtacaacgagctccaaaaggataagatggc |
| | | agaagcctatagcgagattggtatgaaaggggaacgca |
| | | gaagaggcaaaggccacgacggactgtaccagggact |
| | | cagcaccgccaccaaggacacctatgacgctcttcacat |
| | | gcaggccctgccgcctcgg (SEQ ID NO: 154) |
| SP-Linker 1- | MALPVTALLLPLALLLHAARPR | atggccctccctgtcaccgccctgctgcttccgctggctcttc |
| ERmut2-Furin | SSLALSLTADQMVSALLDAEP | tgctccacgccgctcggccccggtcgtcgttggcactttccc |
| cleavage site 2- | PILYSEYDPTRPFSEASMMGL | tgactgccgaccagatggtgtccgcccttctggacgccga |
| CD19 CAR2 | LTNLADRELVHMINWAKRVPG | gcctccaattctgtactcggagtacgatccgactcgcccgtt |
| | FVDLTLHDQVHLLECAWMEIL | ctccgaagccagcatgatgggcctgttgactaacctggcg |
| | MIGLVWRSMEHPGKLLFAPNL | gaccgcgagttggtgcacatgattaactgggctaagcggg |
| | LLDRNQGKCVEGGVEIFDMLL | tgccgggcttcgtggacctgaccctgcacgaccaagtgca |
| | ATSSRFRMMNLQGEEFVCLK | cctcctggaatgcgcctggatggaaatcctcatgatcggcc |
| | SIILLNSGVYTFLSSTLKSLEEK | tcgtgtggagatccatggagcatcccggaaagctcctgttt |
| | DHIHRVLDKITDTLIHLMAKAG | gcacccaacctcctgcttgatcgcaaccagggaaaatgc |
| | LTLQQQHQRLAQLLLILSHIRH | gtggaagggggtgtcgagattttcgacatgctgctcgccac |
| | MSNKRMEHLYSMKCKNVVPL | ctcttcccggttccggatgatgaatctgcagggagaagagt |
| | SDLLLEMLDAHRLGTGAEDPR | tcgtgtgtctgaagtcaatcatcctgctgaactccggggtct |
| | PSRKRRSLGDVGEIVMTQSPA | ataccttcctgagctcgaccctcaagtcactggaggaaaa |
| | TLSLSPGERATLSCRASQDIS | agaccacatccatcgcgtgctcgataagatcaccgacac |
| | KYLNWYQQKPGQAPRLLIYHT | ccttatccatctcatggcgaaggctggactgaccctgcaac |
| | SRLHSGIPARFSGSGSGTDYT | agcagcaccagaggctggcccagttgctgctgattctgag |
| | LTISSLQPEDFAVYFCQQGNT | ccacatccggcacatgtcgaacaagaggatggaacacc |
| | LPYTFGQGTKLEIKGGGGSG | tgtacagcatgaagtgcaagaacgtcgtgcctctgtccgat |
| | GGGSGGGGSQVQLQESGPG | ctgctcctggaaatgctggacgcgcacagactcggaacc |
| | LVKPSETLSLTCTVSGVSLPD | ggcgcggaagacccccggccctccaggaagcgaaggt |
| | YGVSWIRQPPGKGLEWIGVIW | ccctcggagacgtgggtgaaattgtgatgacccagtcacc |
| | GSETTYYSSSLKSRVTISKDN | cgccactcttagcctttcacccggtgagcgcgcaaccctgt |
| | SKNQVSLKLSSVTAADTAVYY | cttgcagagcctcccaagacatctcaaaataccttaattgg |
| | CAKHYYYGGSYAMDYWGQG | tatcaacagaagcccggacaggctcctcgccttctgatcta |
| | TLVTVSSTTTPAPRPPTPAPTI | ccacaccagccggctccattctggaatccctgccaggttc |
| | ASQPLSLRPEACRPAAGGAV | agcggtagcggatctgggaccgactacaccctcactatca |
| | HTRGLDFACDIYIWAPLAGTC | gctcactgcagccagaggacttcgctgtctatttctgtcagc |
| | GVLLLSLVITLYCKRGRKKLLYI | aagggaacaccctgccctacacctttggacagggcacca |
| | FKQPFMRPVQTTQEEDGCSC | agctcgagattaaaggtggaggtggcagcggaggaggt |
| | RFPEEEEGGCELRVKFSRSA | gggtccggcggtggaggaagccaggtccaactccaaga |
| | DAPAYQQGQNQLYNELNLGR | aagcggaccgggtcttgtgaagccatcagaaactctttca |
| | REEYDVLDKRRGRDPEMGGK | ctgacttgtactgtgagcggagtgtctctccccgattacggg |
| | PRRKNPQEGLYNELQKDKMA | gtgtcttggatcagacagccaccggggaagggtctggaat |
| | EAYSEIGMKGERRRGKGHDG | ggattggagtgatttggggctctgagactacttactactcttc |
| | LYQGLSTATKDTYDALHMQAL | atccctcaagtcacgcgtcaccatctcaaaggacaactct |
| | PPR (SEQ ID NO: 155) | aagaatcaggtgtcactgaaactgtcatctgtgaccgcag |
| | | ccgacaccgccgtgtactattgcgctaagcattactattatg |
| | | gcgggagctacgcaatggattactggggacagggtactct |
| | | ggtcaccgtgtccagcaccactaccccagcaccgaggcc |
| | | acccaccccggctcctaccatcgcctcccagcctctgtccc |
| | | tgcgtccggaggcatgtagacccgcagctggtggggccg |
| | | tgcatacccggggtcttgacttcgcctgcgatatctacatttg |
| | | ggcccctctggctggtacttgcggggtcctgctgctttcactc |
| | | gtgatcactctttactgtaagcgcggtcggaagaagctgct |
| | | gtacatctttaagcaacccttcatgaggcctgtgcagacta |
| | | ctcaagaggaggacggctgttcatgccggttcccagagg |
| | | aggaggaaggcggctgcgaactgcgcgtgaaattcagc |
| | | cgcagcgcagatgctccagcctaccagcaggggcagaa |
| | | ccagctctacaacgaactcaatcttggtcggagagagga |
| | | gtacgacgtgctggacaagcggagaggacgggaccca |
| | | gaaatgggcgggaagccgcgcagaaagaatccccaag |
| | | agggcctgtacaacgagctccaaaaggataagatggca |
| | | gaagcctatagcgagattggtatgaaaggggaacgcag |
| | | aagaggcaaaggccacgacggactgtaccagggactc |
| | | agcaccgccaccaaggacacctatgacgctcttcacatg |
| | | caggccctgccgcctcgg (SEQ ID NO: 156) |
| SP-Linker 1- | MALPVTALLLPLALLLHAARPR | atggccctccctgtcaccgccctgctgcttccgctggctcttc |
| ERmut2-Furin | SSLALSLTADQMVSALLDAEP | tgctccacgccgctcggccccggtcgTcgttggcactttcc |
| cleavage site 3- | PILYSEYDPTRPFSEASMMGL | ctgactgccgaccagatggtgtccgcccttctggacgccg |
| CD19 CAR1 | LTNLADRELVHMINWAKRVPG | agcctccaattctgtactcggagtacgatccgactcgcccg |
| | FVDLTLHDQVHLLECAWMEIL | ttctccgaagccagcatgatgggcctgttgactaacctggc |
| | MIGLVWRSMEHPGKLLFAPNL | ggaccgcgagttggtgcacatgattaactgggctaagcgg |
| | LLDRNQGKCVEGGVEIFDMLL | gtgccgggcttcgtggacctgaccctgcacgaccaagtgc |
| | ATSSRFRMMNLQGEEFVCLK | acctcctggaatgcgcctggatggaaatcctcatgatcgg |
| | SIILLNSGVYTFLSSTLKSLEEK | cctcgtgtggagatccatggagcatcccggaaagctcctg |
| | DHIHRVLDKITDTLIHLMAKAG | tttgcacccaacctcctgcttgatcgcaaccagggaaaatg |
| | LTLQQQHQRLAQLLLILSHIRH | cgtggaagggggtgtcgagattttcgacatgctgctcgcca |
| | MSNKRMEHLYSMKCKNVVPL | cctcttcccggttccggatgatgaatctgcagggagaaga |
| | SDLLLEMLDAHRLGTGAEDPR | gttcgtgtgtctgaagtcaatcatcctgctgaactccggggt |
| | PSRKRREIVMTQSPATLSLSP | ctataccttcctgagctcgaccctcaagtcactggaggaaa |
| | GERATLSCRASQDISKYLNWY | aagaccacatccatcgcgtgctcgataagatcaccgaca |
| | QQKPGQAPRLLIYHTSRLHSG | cccttatccatctcatggcgaaggctggactgaccctgcaa |
| | IPARFSGSGSGTDYTLTISSLQ | cagcagcaccagaggctggcccagttgctgctgattctga |
| | PEDFAVYFCQQGNTLPYTFG | gccacatccggcacatgtcgaacaagaggatggaacac |
| | QGTKLEIKGGGGSGGGGSGG | ctgtacagcatgaagtgcaagaacgtcgtgcctctgtccg |
| | GGSQVQLQESGPGLVKPSET | atctgctcctggaaatgctggacgcgcacagactcGgga |
| | LSLTCTVSGVSLPDYGVSWIR | cgggagctgaagatccacgacccagcagaaagcgacg |
| | QPPGKGLEWIGVIWGSETTYY | ggaaattgtgatgacccagtcacccgccactcttagcctttc |
| | SSSLKSRVTISKDNSKNQVSL | acccggtgagcgcgcaaccctgtcttgcagagcctccca |
| | KLSSVTAADTAVYYCAKHYYY | agacatctcaaaataccttaattggtatcaacagaagccc |
| | GGSYAMDYWGQGTLVTVSST | ggacaggctcctcgccttctgatctaccacaccagccggc |
| | TTPAPRPPTPAPTIASQPLSLR | tccattctggaatccctgccaggttcagcggtagcggatct |
| | PEACRPAAGGAVHTRGLDFA | gggaccgactacaccctcactatcagctcactgcagcca |
| | CDIYIWAPLAGTCGVLLLSLVIT | gaggacttcgctgtctatttctgtcagcaagggaacaccct |
| | LYCKRGRKKLLYIFKQPFMRP | gccctacacctttggacagggcaccaagctcgagattaa |
| | VQTTQEEDGCSCRFPEEEEG | aggtggaggtggcagcggaggaggtgggtccggcggtg |
| | GCELRVKFSRSADAPAYKQG | gaggaagccaggtccaactccaagaaagcggaccggg |
| | QNQLYNELNLGRREEYDVLD | tcttgtgaagccatcagaaactctttcactgacttgtactgtg |
| | KRRGRDPEMGGKPRRKNPQ | agcggagtgtctctccccgattacggggtgtcttggatcag |
| | EGLYNELQKDKMAEAYSEIGM | acagccaccggggaagggtctggaatggattggagtgat |
| | KGERRRGKGHDGLYQGLSTA | ttggggctctgagactacttactactcttcatccctcaagtca |
| | TKDTYDALHMQALPPR (SEQ | cgcgtcaccatctcaaaggacaactctaagaatcaggtgt |
| | ID NO: 157) | cactgaaactgtcatctgtgaccgcagccgacaccgccgt |
| | | gtactattgcgctaagcattactattatggcgggagctacgc |
| | | aatggattactggggacagggtactctggtcaccgtgtcca |
| | | gcaccactaccccagcaccgaggccacccaccccggct |
| | | cctaccatcgcctcccagcctctgtccctgcgtccggaggc |
| | | atgtagacccgcagctggtggggccgtgcatacccgggg |
| | | tcttgacttcgcctgcgatatctacatttgggcccctctggctg |
| | | gtacttgcggggtcctgctgctttcactcgtgatcactctttact |
| | | gtaagcgcggtcggaagaagctgctgtacatctttaagca |
| | | acccttcatgaggcctgtgcagactactcaagaggagga |
| | | cggctgttcatgccggttcccagaggaggaggaaggcgg |
| | | ctgcgaactgcgcgtgaaattcagccgcagcgcagatgc |
| | | tccagcctacaagcaggggcagaaccagctctacaacg |
| | | aactcaatcttggtcggagagaggagtacgacgtgctgg |
| | | acaagcggagaggacgggacccagaaatgggcggga |
| | | agccgcgcagaaagaatccccaagagggcctgtacaa |
| | | cgagctccaaaaggataagatggcagaagcctatagcg |
| | | agattggtatgaaaggggaacgcagaagaggcaaagg |
| | | ccacgacggactgtaccagggactcagcaccgccacca |
| | | aggacacctatgacgctcttcacatgcaggccctgccgcc |
| | | tcgg (SEQ ID NO: 158) |
| SP-Linker 1- | MALPVTALLLPLALLLHAARPR | atggccctccctgtcaccgccctgctgcttccgctggctcttc |
| ERmut2-Furin | SSLALSLTADQMVSALLDAEP | tgctccacgccgctcggccccggtcgTcgttggcactttcc |
| cleavage site 3- | PILYSEYDPTRPFSEASMMGL | ctgactgccgaccagatggtgtccgcccttctggacgccg |
| CD19 CAR2 | LTNLADRELVHMINWAKRVPG | agcctccaattctgtactcggagtacgatccgactcgcccg |
| | FVDLTLHDQVHLLECAWMEIL | ttctccgaagccagcatgatgggcctgttgactaacctggc |
| | MIGLVWRSMEHPGKLLFAPNL | ggaccgcgagttggtgcacatgattaactgggctaagcgg |
| | LLDRNQGKCVEGGVEIFDMLL | gtgccgggcttcgtggacctgaccctgcacgaccaagtgc |
| | ATSSRFRMMNLQGEEFVCLK | acctcctggaatgcgcctggatggaaatcctcatgatcgg |
| | SIILLNSGVYTFLSSTLKSLEEK | cctcgtgtggagatccatggagcatcccggaaagctcctg |
| | DHIHRVLDKITDTLIHLMAKAG | tttgcacccaacctcctgcttgatcgcaaccagggaaaatg |
| | LTLQQQHQRLAQLLLILSHIRH | cgtggaagggggtgtcgagattttcgacatgctgctcgcca |
| | MSNKRMEHLYSMKCKNVVPL | cctcttcccggttccggatgatgaatctgcagggagaaga |
| | SDLLLEMLDAHRLGTGAEDPR | gttcgtgtgtctgaagtcaatcatcctgctgaactccggggt |
| | PSRKRREIVMTQSPATLSLSP | ctataccttcctgagctcgaccctcaagtcactggaggaaa |
| | GERATLSCRASQDISKYLNWY | aagaccacatccatcgcgtgctcgataagatcaccgaca |
| | QQKPGQAPRLLIYHTSRLHSG | cccttatccatctcatggcgaaggctggactgaccctgcaa |
| | IPARFSGSGSGTDYTLTISSLQ | cagcagcaccagaggctggcccagttgctgctgattctga |
| | PEDFAVYFCQQGNTLPYTFG | gccacatccggcacatgtcgaacaagaggatggaacac |
| | QGTKLEIKGGGGSGGGGSGG | ctgtacagcatgaagtgcaagaacgtcgtgcctctgtccg |
| | GGSQVQLQESGPGLVKPSET | atctgctcctggaaatgctggacgcgcacagactcGgga |
| | LSLTCTVSGVSLPDYGVSWIR | cgggagctgaagatccacgacccagcagaaagcgacg |
| | QPPGKGLEWIGVIWGSETTYY | ggaaattgtgatgacccagtcacccgccactcttagcctttc |
| | SSSLKSRVTISKDNSKNQVSL | acccggtgagcgcgcaaccctgtcttgcagagcctccca |
| | KLSSVTAADTAVYYCAKHYYY | agacatctcaaaataccttaattggtatcaacagaagccc |
| | GGSYAMDYWGQGTLVTVSST | ggacaggctcctcgccttctgatctaccacaccagccggc |
| | TTPAPRPPTPAPTIASQPLSLR | tccattctggaatccctgccaggttcagcggtagcggatct |
| | PEACRPAAGGAVHTRGLDFA | gggaccgactacaccctcactatcagctcactgcagcca |
| | CDIYIWAPLAGTCGVLLLSLVIT | gaggacttcgctgtctatttctgtcagcaagggaacaccct |
| | LYCKRGRKKLLYIFKQPFMRP | gccctacacctttggacagggcaccaagctcgagattaa |
| | VQTTQEEDGCSCRFPEEEEG | aggtggaggtggcagcggaggaggtgggtccggcggtg |
| | GCELRVKFSRSADAPAYQQG | gaggaagccaggtccaactccaagaaagcggaccggg |
| | QNQLYNELNLGRREEYDVLD | tcttgtgaagccatcagaaactctttcactgacttgtactgtg |
| | KRRGRDPEMGGKPRRKNPQ | agcggagtgtctctccccgattacggggtgtcttggatcag |
| | EGLYNELQKDKMAEAYSEIGM | acagccaccggggaagggtctggaatggattggagtgat |
| | KGERRRGKGHDGLYQGLSTA | ttggggctctgagactacttactactcttcatccctcaagtca |
| | TKDTYDALHMQALPPR (SEQ | cgcgtcaccatctcaaaggacaactctaagaatcaggtgt |
| | ID NO: 159) | cactgaaactgtcatctgtgaccgcagccgacaccgccgt |
| | | gtactattgcgctaagcattactattatggcgggagctacgc |
| | | aatggattactggggacagggtactctggtcaccgtgtcca |
| | | gcaccactaccccagcaccgaggccacccaccccggct |
| | | cctaccatcgcctcccagcctctgtccctgcgtccggaggc |
| | | atgtagacccgcagctggtggggccgtgcatacccgggg |
| | | tcttgacttcgcctgcgatatctacatttgggcccctctggctg |
| | | gtacttgcggggtcctgctgctttcactcgtgatcactctttact |
| | | gtaagcgcggtcggaagaagctgctgtacatctttaagca |
| | | acccttcatgaggcctgtgcagactactcaagaggagga |
| | | cggctgttcatgccggttcccagaggaggaggaaggcgg |
| | | ctgcgaactgcgcgtgaaattcagccgcagcgcagatgc |
| | | tccagcctaccagcaggggcagaaccagctctacaacg |
| | | aactcaatcttggtcggagagaggagtacgacgtgctgg |
| | | acaagcggagaggacgggacccagaaatgggcggga |
| | | agccgcgcagaaagaatccccaagagggcctgtacaa |
| | | cgagctccaaaaggataagatggcagaagcctatagcg |
| | | agattggtatgaaaggggaacgcagaagaggcaaagg |
| | | ccacgacggactgtaccagggactcagcaccgccacca |
| | | aggacacctatgacgctcttcacatgcaggccctgccgcc |
| | | tcgg (SEQ ID NO: 160) |
| SP-Linker 1- | MALPVTALLLPLALLLHAARPR | atggccctccctgtcaccgccctgctgcttccgctggctcttc |
| ERmut1-Furin | SSLALSLTADQMVSALLDAEP | tgctccacgccgctcggccccggtcgTcgttggcactttcc |
| cleavage site 1- | PILYSEYDPTRPFSEASMMGL | ctgactgccgaccagatggtgtccgcccttctggacgccg |
| CD123 CAR | LTNLADRELVHMINWAKRVPG | agcctccaattctgtactcggagtacgatccgactcgcccg |
| | FVDLALHDQVHLLECAWMEIL | ttctccgaagccagcatgatgggcctgttgactaacctggc |
| | MIGLVWRSMEHPGKLLFAPNL | ggaccgcgagttggtgcacatgattaactgggctaagcgg |
| | LLDRNQGKCVEGGVEIFDMLL | gtgccgggcttcgtggacctggccctgcacgaccaagtgc |
| | ATSSRFRMMNLQGEEFVCLK | acctcctggaatgcgcctggatggaaatcctcatgatcgg |
| | SIILLNSGVYTFLSSTLKSLEEK | cctcgtgtggagatccatggagcatcccggaaagctcctg |
| | DHIHRVLDKITDTLIHLMAKAG | tttgcacccaacctcctgcttgatcgcaaccagggaaaatg |
| | LTLQQQHQRLAQLLLILSHIRH | cgtggaagggggtgtcgagattttcgacatgctgctcgcca |
| | MSSKRMEHLYSMKCKNVVPL | cctcttcccggttccggatgatgaatctgcagggagaaga |
| | SDLLLEMLDAHRLRTKRQVQL | gttcgtgtgtctgaagtcaatcatcctgctgaactccggggt |
| | VQSGAEVKKPGASVKVSCKA | ctataccttcctgagctcgaccctcaagtcactggaggaaa |
| | SGYTFTGYYMHWVRQAPGQ | aagaccacatccatcgcgtgctcgataagatcaccgaca |
| | GLEWMGWINPNSGGTNYAQ | cccttatccatctcatggcgaaggctggactgaccctgcaa |
| | KFQGRVTLTRDTSISTVYMEL | cagcagcaccagaggctggcccagttgctgctgattctga |
| | SRLRSDDTAVYYCARDMNILA | gccacatccggcacatgtcgtccaagaggatggaacacc |
| | TVPFDIWGQGTMVTVSSGGG | tgtacagcatgaagtgcaagaacgtcgtgcctctgtccgat |
| | GSGGGGSGGGGSDIQMTQS | ctgctcctggaaatgctggacgcgcacagactccgtacta |
| | PSSLSASVGDRVTITCRASQSI | aaagacaagtgcaactcgtccaaagcggagcggaagtc |
| | SSYLNWYQQKPGKAPKLLIYA | aagaaacccggagcgagcgtgaaagtgtcctgcaaagc |
| | ASSLQSGVPSRFSGSGSGTD | ctccggctacacctttacgggctactacatgcactgggtgc |
| | FTLTVNSLQPEDFATYYCQQG | gccaggcaccaggacagggtcttgaatggatgggatgg |
| | DSVPLTFGGGTRLEIKTTTPAP | atcaaccctaattcgggcggaactaactacgcacagaag |
| | RPPTPAPTIASQPLSLRPEAC | ttccaggggagagtgactctgactcgggatacctccatctc |
| | RPAAGGAVHTRGLDFACDIYI | aactgtctacatggaactctcccgcttgcggtcagatgata |
| | WAPLAGTCGVLLLSLVITLYCK | cggcagtgtactactgcgcccgcgacatgaatatcctggct |
| | RGRKKLLYIFKQPFMRPVQTT | accgtgccgttcgacatctggggacaggggactatggtta |
| | QEEDGCSCRFPEEEEGGCEL | ctgtctcatcgggcggtggaggttcaggaggaggcggctc |
| | RVKFSRSADAPAYQQGQNQL | gggaggcggaggttcggacattcagatgacccagtcccc |
| | YNELNLGRREEYDVLDKRRG | atcctctctgtcggccagcgtcggagatagggtgaccatta |
| | RDPEMGGKPRRKNPQEGLYN | cctgtcgggcctcgcaaagcatctcctcgtacctcaactgg |
| | ELQKDKMAEAYSEIGMKGER | tatcagcaaaagccgggaaaggcgcctaagctgctgatc |
| | RRGKGHDGLYQGLSTATKDT | tacgccgcttcgagcttgcaaagcggggtgccatccagat |
| | YDALHMQALPPR (SEQ ID | tctcgggatcaggctcaggaaccgacttcaccctgaccgt |
| | NO: 161) | gaacagcctccagccggaggactttgccacttactactgc |
| | | cagcagggagactccgtgccgcttactttcggggggggta |
| | | cccgcctggagatcaagaccactaccccagcaccgagg |
| | | ccacccaccccggctcctaccatcgcctcccagcctctgtc |
| | | cctgcgtccggaggcatgtagacccgcagctggtggggc |
| | | cgtgcatacccggggtcttgacttcgcctgcgatatctacatt |
| | | tgggcccctctggctggtacttgcggggtcctgctgctttcac |
| | | tcgtgatcactctttactgtaagcgcggtcggaagaagctg |
| | | ctgtacatctttaagcaacccttcatgaggcctgtgcagact |
| | | actcaagaggaggacggctgttcatgccggttcccagag |
| | | gaggaggaaggcggctgcgaactgcgcgtgaaattcag |
| | | ccgcagcgcagatgctccagcctaccagcaggggcaga |
| | | accagctctacaacgaactcaatcttggtcggagagagg |
| | | agtacgacgtgctggacaagcggagaggacgggaccc |
| | | agaaatgggcgggaagccgcgcagaaagaatccccaa |
| | | gagggcctgtacaacgagctccaaaaggataagatggc |
| | | agaagcctatagcgagattggtatgaaaggggaacgca |
| | | gaagaggcaaaggccacgacggactgtaccagggact |
| | | cagcaccgccaccaaggacacctatgacgctcttcacat |
| | | gcaggccctgccgcctcgg (SEQ ID NO: 162) |
| SP-Linker 1- | MALPVTALLLPLALLLHAARPR | atggccctccctgtcaccgccctgctgcttccgctggctcttc |
| ERmut1-Furin | SSLALSLTADQMVSALLDAEP | tgctccacgccgctcggccccggtcgtcgttggcactttccc |
| cleavage site 2- | PILYSEYDPTRPFSEASMMGL | tgactgccgaccagatggtgtccgcccttctggacgccga |
| CD123 CAR | LTNLADRELVHMINWAKRVPG | gcctccaattctgtactcggagtacgatccgactcgcccgtt |
| (construct 119) | FVDLALHDQVHLLECAWMEIL | ctccgaagccagcatgatgggcctgttgactaacctggcg |
| | MIGLVWRSMEHPGKLLFAPNL | gaccgcgagttggtgcacatgattaactgggctaagcggg |
| | LLDRNQGKCVEGGVEIFDMLL | tgccgggcttcgtggacctggccctgcacgaccaagtgca |
| | ATSSRFRMMNLQGEEFVCLK | cctcctggaatgcgcctggatggaaatcctcatgatcggcc |
| | SIILLNSGVYTFLSSTLKSLEEK | tcgtgtggagatccatggagcatcccggaaagctcctgttt |
| | DHIHRVLDKITDTLIHLMAKAG | gcacccaacctcctgcttgatcgcaaccagggaaaatgc |
| | LTLQQQHQRLAQLLLILSHIRH | gtggaagggggtgtcgagattttcgacatgctgctcgccac |
| | MSSKRMEHLYSMKCKNVVPL | ctcttcccggttccggatgatgaatctgcagggagaagagt |
| | SDLLLEMLDAHRLGTGAEDPR | tcgtgtgtctgaagtcaatcatcctgctgaactccggggtct |
| | PSRKRRSLGDVGQVQLVQSG | ataccttcctgagctcgaccctcaagtcactggaggaaaa |
| | AEVKKPGASVKVSCKASGYTF | agaccacatccatcgcgtgctcgataagatcaccgacac |
| | TGYYMHWVRQAPGQGLEWM | ccttatccatctcatggcgaaggctggactgaccctgcaac |
| | GWINPNSGGTNYAQKFQGRV | agcagcaccagaggctggcccagttgctgctgattctgag |
| | TLTRDTSISTVYMELSRLRSD | ccacatccggcacatgtcgtccaagaggatggaacacct |
| | DTAVYYCARDMNILATVPFDI | gtacagcatgaagtgcaagaacgtcgtgcctctgtccgat |
| | WGQGTMVTVSSGGGGSGGG | ctgctcctggaaatgctggacgcgcacagactcggaacc |
| | GSGGGGSDIQMTQSPSSLSA | ggcgcggaagacccccggccctccaggaagcgaaggt |
| | SVGDRVTITCRASQSISSYLN | ccctcggagacgtgggtcaagtgcaactcgtccaaagcg |
| | WYQQKPGKAPKLLIYAASSLQ | gagcggaagtcaagaaacccggagcgagcgtgaaagt |
| | SGVPSRFSGSGSGTDFTLTV | gtcctgcaaagcctccggctacacctttacgggctactaca |
| | NSLQPEDFATYYCQQGDSVP | tgcactgggtgcgccaggcaccaggacagggtcttgaat |
| | LTFGGGTRLEIKTTTPAPRPPT | ggatgggatggatcaaccctaattcgggcggaactaacta |
| | PAPTIASQPLSLRPEACRPAA | cgcacagaagttccaggggagagtgactctgactcggga |
| | GGAVHTRGLDFACDIYIWAPL | tacctccatctcaactgtctacatggaactctcccgcttgcg |
| | AGTCGVLLLSLVITLYCKRGRK | gtcagatgatacggcagtgtactactgcgcccgcgacatg |
| | KLLYIFKQPFMRPVQTTQEED | aatatcctggctaccgtgccgttcgacatctggggacagg |
| | GCSCRFPEEEEGGCELRVKF | ggactatggttactgtctcatcgggcggtggaggttcagga |
| | SRSADAPAYQQGQNQLYNEL | ggaggcggctcgggaggcggaggttcggacattcagat |
| | NLGRREEYDVLDKRRGRDPE | gacccagtccccatcctctctgtcggccagcgtcggagat |
| | MGGKPRRKNPQEGLYNELQK | agggtgaccattacctgtcgggcctcgcaaagcatctcctc |
| | DKMAEAYSEIGMKGERRRGK | gtacctcaactggtatcagcaaaagccgggaaaggcgc |
| | GHDGLYQGLSTATKDTYDAL | ctaagctgctgatctacgccgcttcgagcttgcaaagcgg |
| | HMQALPPR | ggtgccatccagattctcgggatcaggctcaggaaccga |
| | (SEQ ID NO: 163) | cttcaccctgaccgtgaacagcctccagccggaggacttt |
| | | gccacttactactgccagcagggagactccgtgccgctta |
| | | ctttcggggggggtacccgcctggagatcaagaccacta |
| | | ccccagcaccgaggccacccaccccggctcctaccatcg |
| | | cctcccagcctctgtccctgcgtccggaggcatgtagaccc |
| | | gcagctggtggggccgtgcatacccggggtcttgacttcg |
| | | cctgcgatatctacatttgggcccctctggctggtacttgcgg |
| | | ggtcctgctgctttcactcgtgatcactctttactgtaagcgcg |
| | | gtcggaagaagctgctgtacatctttaagcaacccttcatg |
| | | aggcctgtgcagactactcaagaggaggacggctgttcat |
| | | gccggttcccagaggaggaggaaggcggctgcgaactg |
| | | cgcgtgaaattcagccgcagcgcagatgctccagcctac |
| | | cagcaggggcagaaccagctctacaacgaactcaatctt |
| | | ggtcggagagaggagtacgacgtgctggacaagcgga |
| | | gaggacgggacccagaaatgggcgggaagccgcgca |
| | | gaaagaatccccaagagggcctgtacaacgagctccaa |
| | | aaggataagatggcagaagcctatagcgagattggtatg |
| | | aaaggggaacgcagaagaggcaaaggccacgacgg |
| | | actgtaccagggactcagcaccgccaccaaggacacct |
| | | atgacgctcttcacatgcaggccctgccgcctcgg |
| | | (SEQ ID NO: 164) |
| SP-Linker 1- | MALPVTALLLPLALLLHAARPR | atggccctccctgtcaccgccctgctgcttccgctggctcttc |
| ERmut1-Furin | SSLALSLTADQMVSALLDAEP | tgctccacgccgctcggccccggtcgtcgttggcactttccc |
| cleavage site 3- | PILYSEYDPTRPFSEASMMGL | tgactgccgaccagatggtgtccgcccttctggacgccgag |
| CD123 CAR | LTNLADRELVHMINWAKRVPG | cctccaattctgtactcggagtacgatccgactcgcccgttc |
| (construct 122) | FVDLALHDQVHLLECAWMEIL | tccgaagccagcatgatgggcctgttgactaacctggcgga |
| | MIGLVWRSMEHPGKLLFAPNL | ccgcgagttggtgcacatgattaactgggctaagcgggtgc |
| | LLDRNQGKCVEGGVEIFDMLL | cgggcttcgtggacctggccctgcacgaccaagtgcacctc |
| | ATSSRFRMMNLQGEEFVCLK | ctggaatgcgcctggatggaaatcctcatgatcggcctcgt |
| | SIILLNSGVYTFLSSTLKSLEEK | gtggagatccatggagcatcccggaaagctcctgtttgcac |
| | DHIHRVLDKITDTLIHLMAKAG | ccaacctcctgcttgatcgcaaccagggaaaatgcgtgga |
| | LTLQQQHQRLAQLLLILSHIRH | agggggtgtcgagattttcgacatgctgctcgccacctcttc |
| | MSSKRMEHLYSMKCKNVVPL | ccggttccggatgatgaatctgcagggagaagagttcgtgt |
| | SDLLLEMLDAHRLGTGAEDPR | gtctgaagtcaatcatcctgctgaactccggggtctatacct |
| | PSRKRRQVQLVQSGAEVKKP | tcctgagctcgaccctcaagtcactggaggaaaaagacca |
| | GASVKVSCKASGYTFTGYYM | catccatcgcgtgctcgataagatcaccgacacccttatcc |
| | HWVRQAPGQGLEWMGWINP | atctcatggcgaaggctggactgaccctgcaacagcagca |
| | NSGGTNYAQKFQGRVTLTRD | ccagaggctggcccagttgctgctgattctgagccacatcc |
| | TSISTVYMELSRLRSDDTAVY | ggcacatgtcgtccaagaggatggaacacctgtacagcat |
| | YCARDMNILATVPFDIWGQGT | gaagtgcaagaacgtcgtgcctctgtccgatctgctcctgg |
| | MVTVSSGGGGSGGGGSGGG | aaatgctggacgcgcacagactcggaaccggcgcggaag |
| | GSDIQMTQSPSSLSASVGDR | acccccggccctccaggaagcgaaggcaagtgcaactcgt |
| | VTITCRASQSISSYLNWYQQK | ccaaagcggagcggaagtcaagaaacccggagcgagcgt |
| | PGKAPKLLIYAASSLQSGVPS | gaaagtgtcctgcaaagcctccggctacacctttacgggct |
| | RFSGSGSGTDFTLTVNSLQPE | actacatgcactgggtgcgccaggcaccaggacagggtct |
| | DFATYYCQQGDSVPLTFGGG | tgaatggatgggatggatcaaccctaattcgggcggaact |
| | TRLEIKTTTPAPRPPTPAPTI | aactacgcacagaagttccaggggagagtgactctgactc |
| | ASQPLSLRPEACRPAAGG | gggatacctccatctcaactgtctacatggaactctcccgct |
| | AVHTRGLDFACDIYIWAPLA | tgcggtcagatgatacggcagtgtactactgcgcccgcgac |
| | GTCGVLLLSLVITLYCKRGR | atgaatatcctggctaccgtgccgttcgacatctggggaca |
| | KKLLYIFKQPFMRPVQTTQ | ggggactatggttactgtctcatcgggcggtggaggttcag |
| | EEDGCSCRFPEEEEGGCE | gaggaggcggctcgggaggcggaggttcggacattcagat |
| | LRVKFSRSADAPAYQQGQ | gacccagtccccatcctctctgtcggccagcgtcggagata |
| | NQLYNELNLGRREEYDVLD | gggtgaccattacctgtcgggcctcgcaaagcatctcctcgt |
| | KRRGRDPEMGGKPRRKNP | acctcaactggtatcagcaaaagccgggaaaggcgcctaa |
| | QEGLYNELQKDKMAEAYS | gctgctgatctacgccgcttcgagcttgcaaagcggggtgc |
| | EIGMKGERRRGKGHDGLY | catccagattctcgggatcaggctcaggaaccgacttcacc |
| | QGLSTATKDTYDALHMQAL | ctgaccgtgaacagcctccagccggaggactttgccactta |
| | PPR (SEQ ID NO: 165) | ctactgccagcagggagactccgtgccgcttactttcgggg |
| | | ggggtacccgcctggagatcaagaccactaccccagcacc |
| | | gaggccacccaccccggctcctaccatcgcctcccagcctc |
| | | tgtccctgcgtccggaggcatgtagacccgcagctggtggg |
| | | gccgtgcatacccggggtcttgacttcgcctgcgatatctac |
| | | atttgggcccctctggctggtacttgcggggtcctgctgcttt |
| | | cactcgtgatcactctttactgtaagcgcggtcggaagaag |
| | | ctgctgtacatctttaagcaacccttcatgaggcctgtgcag |
| | | actactcaagaggaggacggctgttcatgccggttcccaga |
| | | ggaggaggaaggcggctgcgaactgcgcgtgaaattcag |
| | | ccgcagcgcagatgctccagcctaccagcaggggcagaac |
| | | cagctctacaacgaactcaatcttggtcggagagaggagt |
| | | acgacgtgctggacaagcggagaggacgggacccagaaa |
| | | tgggcgggaagccgcgcagaaagaatccccaagagggcc |
| | | tgtacaacgagctccaaaaggataagatggcagaagccta |
| | | tagcgagattggtatgaaaggggaacgcagaagaggcaa |
| | | aggccacgacggactgtaccagggactcagcaccgccacc |
| | | aaggacacctatgacgctcttcacatgcaggccctgccgcc |
| | | tcgg (SEQ ID NO: 166) |
| SP-Linker 1- | MALPVTALLLPLALLLHAARPR | atggccctccctgtcaccgccctgctgcttccgctggctcttc |
| ERmut2-Furin | SSLALSLTADQMVSALLDAEP | tgctccacgccgctcggccccggtcgTcgttggcactttcc |
| cleavage site 1- | PILYSEYDPTRPFSEASMMGL | ctgactgccgaccagatggtgtccgcccttctggacgccg |
| CD123 CAR | LTNLADRELVHMINWAKRVPG | agcctccaattctgtactcggagtacgatccgactcgcccg |
| | FVDLTLHDQVHLLECAWMEIL | ttctccgaagccagcatgatgggcctgttgactaacctggc |
| | MIGLVWRSMEHPGKLLFAPNL | ggaccgcgagttggtgcacatgattaactgggctaagcgg |
| | LLDRNQGKCVEGGVEIFDMLL | gtgccgggcttcgtggacctgaccctgcacgaccaagtgc |
| | ATSSRFRMMNLQGEEFVCLK | acctcctggaatgcgcctggatggaaatcctcatgatcgg |
| | SIILLNSGVYTFLSSTLKSLEEK | cctcgtgtggagatccatggagcatcccggaaagctcctg |
| | DHIHRVLDKITDTLIHLMAKAG | tttgcacccaacctcctgcttgatcgcaaccagggaaaatg |
| | LTLQQQHQRLAQLLLILSHIRH | cgtggaagggggtgtcgagattttcgacatgctgctcgcca |
| | MSNKRMEHLYSMKCKNVVPL | cctcttcccggttccggatgatgaatctgcagggagaaga |
| | SDLLLEMLDAHRLRTKRQVQL | gttcgtgtgtctgaagtcaatcatcctgctgaactccggggt |
| | VQSGAEVKKPGASVKVSCKA | ctataccttcctgagctcgaccctcaagtcactggaggaaa |
| | SGYTFTGYYMHWVRQAPGQ | aagaccacatccatcgcgtgctcgataagatcaccgaca |
| | GLEWMGWINPNSGGTNYAQ | cccttatccatctcatggcgaaggctggactgaccctgcaa |
| | KFQGRVTLTRDTSISTVYMEL | cagcagcaccagaggctggcccagttgctgctgattctga |
| | SRLRSDDTAVYYCARDMNILA | gccacatccggcacatgtcgaacaagaggatggaacac |
| | TVPFDIWGQGTMVTVSSGGG | ctgtacagcatgaagtgcaagaacgtcgtgcctctgtccg |
| | GSGGGGSGGGGSDIQMTQS | atctgctcctggaaatgctggacgcgcacagactccgtact |
| | PSSLSASVGDRVTITCRASQSI | aaaagacaagtgcaactcgtccaaagcggagcggaagt |
| | SSYLNWYQQKPGKAPKLLIYA | caagaaacccggagcgagcgtgaaagtgtcctgcaaag |
| | ASSLQSGVPSRFSGSGSGTD | cctccggctacacctttacgggctactacatgcactgggtg |
| | FTLTVNSLQPEDFATYYCQQG | cgccaggcaccaggacagggtcttgaatggatgggatgg |
| | DSVPLTFGGGTRLEIKTTTPAP | atcaaccctaattcgggcggaactaactacgcacagaag |
| | RPPTPAPTIASQPLSLRPEAC | ttccaggggagagtgactctgactcgggatacctccatctc |
| | RPAAGGAVHTRGLDFACDIYI | aactgtctacatggaactctcccgcttgcggtcagatgata |
| | WAPLAGTCGVLLLSLVITLYCK | cggcagtgtactactgcgcccgcgacatgaatatcctggct |
| | RGRKKLLYIFKQPFMRPVQTT | accgtgccgttcgacatctggggacaggggactatggtta |
| | QEEDGCSCRFPEEEEGGCEL | ctgtctcatcgggcggtggaggttcaggaggaggcggctc |
| | RVKFSRSADAPAYQQGQNQL | gggaggcggaggttcggacattcagatgacccagtcccc |
| | YNELNLGRREEYDVLDKRRG | atcctctctgtcggccagcgtcggagatagggtgaccatta |
| | RDPEMGGKPRRKNPQEGLYN | cctgtcgggcctcgcaaagcatctcctcgtacctcaactgg |
| | ELQKDKMAEAYSEIGMKGER | tatcagcaaaagccgggaaaggcgcctaagctgctgatc |
| | RRGKGHDGLYQGLSTATKDT | tacgccgcttcgagcttgcaaagcggggtgccatccagat |
| | YDALHMQALPPR (SEQ ID | tctcgggatcaggctcaggaaccgacttcaccctgaccgt |
| | NO: 167) | gaacagcctccagccggaggactttgccacttactactgc |
| | | cagcagggagactccgtgccgcttactttcggggggggta |
| | | cccgcctggagatcaagaccactaccccagcaccgagg |
| | | ccacccaccccggctcctaccatcgcctcccagcctctgtc |
| | | cctgcgtccggaggcatgtagacccgcagctggtggggc |
| | | cgtgcatacccggggtcttgacttcgcctgcgatatctacatt |
| | | tgggcccctctggctggtacttgcggggtcctgctgctttcac |
| | | tcgtgatcactctttactgtaagcgcggtcggaagaagctg |
| | | ctgtacatctttaagcaacccttcatgaggcctgtgcagact |
| | | actcaagaggaggacggctgttcatgccggttcccagag |
| | | gaggaggaaggcggctgcgaactgcgcgtgaaattcag |
| | | ccgcagcgcagatgctccagcctaccagcaggggcaga |
| | | accagctctacaacgaactcaatcttggtcggagagagg |
| | | agtacgacgtgctggacaagcggagaggacgggaccc |
| | | agaaatgggcgggaagccgcgcagaaagaatccccaa |
| | | gagggcctgtacaacgagctccaaaaggataagatggc |
| | | agaagcctatagcgagattggtatgaaaggggaacgca |
| | | gaagaggcaaaggccacgacggactgtaccagggact |
| | | cagcaccgccaccaaggacacctatgacgctcttcacat |
| | | gcaggccctgccgcctcgg |
| | | (SEQ ID NO: 168) |
| SP-Linker 1- | MALPVTALLLPLALLLHAARPR | atggccctccctgtcaccgccctgctgcttccgctggctcttc |
| ERmut2-Furin | SSLALSLTADQMVSALLDAEP | tgctccacgccgctcggccccggtcgTcgttggcactttcc |
| cleavage site 2- | PILYSEYDPTRPFSEASMMGL | ctgactgccgaccagatggtgtccgcccttctggacgccg |
| CD123 CAR | LTNLADRELVHMINWAKRVPG | agcctccaattctgtactcggagtacgatccgactcgcccg |
| | FVDLTLHDQVHLLECAWMEIL | ttctccgaagccagcatgatgggcctgttgactaacctggc |
| | MIGLVWRSMEHPGKLLFAPNL | ggaccgcgagttggtgcacatgattaactgggctaagcgg |
| | LLDRNQGKCVEGGVEIFDMLL | gtgccgggcttcgtggacctgaccctgcacgaccaagtgc |
| | ATSSRFRMMNLQGEEFVCLK | acctcctggaatgcgcctggatggaaatcctcatgatcgg |
| | SIILLNSGVYTFLSSTLKSLEEK | cctcgtgtggagatccatggagcatcccggaaagctcctg |
| | DHIHRVLDKITDTLIHLMAKAG | tttgcacccaacctcctgcttgatcgcaaccagggaaaatg |
| | LTLQQQHQRLAQLLLILSHIRH | cgtggaagggggtgtcgagattttcgacatgctgctcgcca |
| | MSNKRMEHLYSMKCKNVVPL | cctcttcccggttccggatgatgaatctgcagggagaaga |
| | SDLLLEMLDAHRLGTGAEDPR | gttcgtgtgtctgaagtcaatcatcctgctgaactccggggt |
| | PSRKRRSLGDVGQVQLVQSG | ctataccttcctgagctcgaccctcaagtcactggaggaaa |
| | AEVKKPGASVKVSCKASGYTF | aagaccacatccatcgcgtgctcgataagatcaccgaca |
| | TGYYMHWVRQAPGQGLEWM | cccttatccatctcatggcgaaggctggactgaccctgcaa |
| | GWINPNSGGTNYAQKFQGRV | cagcagcaccagaggctggcccagttgctgctgattctga |
| | TLTRDTSISTVYMELSRLRSD | gccacatccggcacatgtcgaacaagaggatggaacac |
| | DTAVYYCARDMNILATVPFDI | ctgtacagcatgaagtgcaagaacgtcgtgcctctgtccg |
| | WGQGTMVTVSSGGGGSGGG | atctgctcctggaaatgctggacgcgcacagactcggaa |
| | GSGGGGSDIQMTQSPSSLSA | ccggcgcggaagacccccggccctccaggaagcgaag |
| | SVGDRVTITCRASQSISSYLN | gtccctcggagacgtgggtcaagtgcaactcgtccaaag |
| | WYQQKPGKAPKLLIYAASSLQ | cggagcggaagtcaagaaacccggagcgagcgtgaaa |
| | SGVPSRFSGSGSGTDFTLTV | gtgtcctgcaaagcctccggctacacctttacgggctacta |
| | NSLQPEDFATYYCQQGDSVP | catgcactgggtgcgccaggcaccaggacagggtcttga |
| | LTFGGGTRLEIKTTTPAPRPPT | atggatgggatggatcaaccctaattcgggcggaactaac |
| | PAPTIASQPLSLRPEACRPAA | tacgcacagaagttccaggggagagtgactctgactcgg |
| | GGAVHTRGLDFACDIYIWAPL | gatacctccatctcaactgtctacatggaactctcccgcttg |
| | AGTCGVLLLSLVITLYCKRGRK | cggtcagatgatacggcagtgtactactgcgcccgcgac |
| | KLLYIFKQPFMRPVQTTQEED | atgaatatcctggctaccgtgccgttcgacatctggggaca |
| | GCSCRFPEEEEGGCELRVKF | ggggactatggttactgtctcatcgggcggtggaggttcag |
| | SRSADAPAYQQGQNQLYNEL | gaggaggcggctcgggaggcggaggttcggacattcag |
| | NLGRREEYDVLDKRRGRDPE | atgacccagtccccatcctctctgtcggccagcgtcggag |
| | MGGKPRRKNPQEGLYNELQK | atagggtgaccattacctgtcgggcctcgcaaagcatctcc |
| | DKMAEAYSEIGMKGERRRGK | tcgtacctcaactggtatcagcaaaagccgggaaaggcg |
| | GHDGLYQGLSTATKDTYDAL | cctaagctgctgatctacgccgcttcgagcttgcaaagcgg |
| | HMQALPPR (SEQ ID NO: 169) | ggtgccatccagattctcgggatcaggctcaggaaccga |
| | | cttcaccctgaccgtgaacagcctccagccggaggacttt |
| | | gccacttactactgccagcagggagactccgtgccgctta |
| | | ctttcggggggggtacccgcctggagatcaagaccacta |
| | | ccccagcaccgaggccacccaccccggctcctaccatcg |
| | | cctcccagcctctgtccctgcgtccggaggcatgtagaccc |
| | | gcagctggtggggccgtgcatacccggggtcttgacttcg |
| | | cctgcgatatctacatttgggcccctctggctggtacttgcgg |
| | | ggtcctgctgctttcactcgtgatcactctttactgtaagcgcg |
| | | gtcggaagaagctgctgtacatctttaagcaacccttcatg |
| | | aggcctgtgcagactactcaagaggaggacggctgttcat |
| | | gccggttcccagaggaggaggaaggcggctgcgaactg |
| | | cgcgtgaaattcagccgcagcgcagatgctccagcctac |
| | | cagcaggggcagaaccagctctacaacgaactcaatctt |
| | | ggtcggagagaggagtacgacgtgctggacaagcgga |
| | | gaggacgggacccagaaatgggcgggaagccgcgca |
| | | gaaagaatccccaagagggcctgtacaacgagctccaa |
| | | aaggataagatggcagaagcctatagcgagattggtatg |
| | | aaaggggaacgcagaagaggcaaaggccacgacgg |
| | | actgtaccagggactcagcaccgccaccaaggacacct |
| | | atgacgctcttcacatgcaggccctgccgcctcgg (SEQ |
| | | ID NO: 170) |
| SP-Linker 1- | MALPVTALLLPLALLLHAARPR | atggccctccctgtcaccgccctgctgcttccgctggctcttc |
| ERmut2-Furin | SSLALSLTADQMVSALLDAEP | tgctccacgccgctcggccccggtcgTcgttggcactttcc |
| cleavage site 3- | PILYSEYDPTRPFSEASMMGL | ctgactgccgaccagatggtgtccgcccttctggacgccg |
| CD123 CAR | LTNLADRELVHMINWAKRVPG | agcctccaattctgtactcggagtacgatccgactcgcccg |
| | FVDLTLHDQVHLLECAWMEIL | ttctccgaagccagcatgatgggcctgttgactaacctggc |
| | MIGLVWRSMEHPGKLLFAPNL | ggaccgcgagttggtgcacatgattaactgggctaagcgg |
| | LLDRNQGKCVEGGVEIFDMLL | gtgccgggcttcgtggacctgaccctgcacgaccaagtgc |
| | ATSSRFRMMNLQGEEFVCLK | acctcctggaatgcgcctggatggaaatcctcatgatcgg |
| | SIILLNSGVYTFLSSTLKSLEEK | cctcgtgtggagatccatggagcatcccggaaagctcctg |
| | DHIHRVLDKITDTLIHLMAKAG | tttgcacccaacctcctgcttgatcgcaaccagggaaaatg |
| | LTLQQQHQRLAQLLLILSHIRH | cgtggaagggggtgtcgagattttcgacatgctgctcgcca |
| | MSNKRMEHLYSMKCKNVVPL | cctcttcccggttccggatgatgaatctgcagggagaaga |
| | SDLLLEMLDAHRLGTGAEDPR | gttcgtgtgtctgaagtcaatcatcctgctgaactccggggt |
| | PSRKRRQVQLVQSGAEVKKP | ctataccttcctgagctcgaccctcaagtcactggaggaaa |
| | GASVKVSCKASGYTFTGYYM | aagaccacatccatcgcgtgctcgataagatcaccgaca |
| | HWVRQAPGQGLEWMGWINP | cccttatccatctcatggcgaaggctggactgaccctgcaa |
| | NSGGTNYAQKFQGRVTLTRD | cagcagcaccagaggctggcccagttgctgctgattctga |
| | TSISTVYMELSRLRSDDTAVY | gccacatccggcacatgtcgaacaagaggatggaacac |
| | YCARDMNILATVPFDIWGQGT | ctgtacagcatgaagtgcaagaacgtcgtgcctctgtccg |
| | MVTVSSGGGGSGGGGSGGG | atctgctcctggaaatgctggacgcgcacagactcggga |
| | GSDIQMTQSPSSLSASVGDR | cgggagctgaagatccacgacccagcagaaagcgacg |
| | VTITCRASQSISSYLNWYQQK | gcaagtgcaactcgtccaaagcggagcggaagtcaaga |
| | PGKAPKLLIYAASSLQSGVPS | aacccggagcgagcgtgaaagtgtcctgcaaagcctcc |
| | RFSGSGSGTDFTLTVNSLQPE | ggctacacctttacgggctactacatgcactgggtgcgcca |
| | DFATYYCQQGDSVPLTFGGG | ggcaccaggacagggtcttgaatggatgggatggatcaa |
| | TRLEIKTTTPAPRPPTPAPTIA | ccctaattcgggcggaactaactacgcacagaagttcca |
| | SQPLSLRPEACRPAAGGAVH | ggggagagtgactctgactcgggatacctccatctcaact |
| | TRGLDFACDIYIWAPLAGTCG | gtctacatggaactctcccgcttgcggtcagatgatacggc |
| | VLLLSLVITLYCKRGRKKLLYIF | agtgtactactgcgcccgcgacatgaatatcctggctaccg |
| | KQPFMRPVQTTQEEDGCSCR | tgccgttcgacatctggggacaggggactatggttactgtct |
| | FPEEEEGGCELRVKFSRSAD | catcgggcggtggaggttcaggaggaggcggctcggga |
| | APAYQQGQNQLYNELNLGRR | ggcggaggttcggacattcagatgacccagtccccatcct |
| | EEYDVLDKRRGRDPEMGGKP | ctctgtcggccagcgtcggagatagggtgaccattacctgt |
| | RRKNPQEGLYNELQKDKMAE | cgggcctcgcaaagcatctcctcgtacctcaactggtatca |
| | AYSEIGMKGERRRGKGHDGL | gcaaaagccgggaaaggcgcctaagctgctgatctacg |
| | YQGLSTATKDTYDALHMQALP | ccgcttcgagcttgcaaagcggggtgccatccagattctcg |
| | PR* (SEQ ID NO: 171) | ggatcaggctcaggaaccgacttcaccctgaccgtgaac |
| | | agcctccagccggaggactttgccacttactactgccagc |
| | | agggagactccgtgccgcttactttcggggggggtacccg |
| | | cctggagatcaagaccactaccccagcaccgaggccac |
| | | ccaccccggctcctaccatcgcctcccagcctctgtccctg |
| | | cgtccggaggcatgtagacccgcagctggtggggccgtg |
| | | catacccggggtcttgacttcgcctgcgatatctacatttgg |
| | | gcccctctggctggtacttgcggggtcctgctgctttcactcg |
| | | tgatcactctttactgtaagcgcggtcggaagaagctgctgt |
| | | acatctttaagcaacccttcatgaggcctgtgcagactactc |
| | | aagaggaggacggctgttcatgccggttcccagaggagg |
| | | aggaaggcggctgcgaactgcgcgtgaaattcagccgc |
| | | agcgcagatgctccagcctaccagcaggggcagaacca |
| | | gctctacaacgaactcaatcttggtcggagagaggagtac |
| | | gacgtgctggacaagcggagaggacgggacccagaaa |
| | | tgggcgggaagccgcgcagaaagaatccccaagaggg |
| | | cctgtacaacgagctccaaaaggataagatggcagaag |
| | | cctatagcgagattggtatgaaaggggaacgcagaaga |
| | | ggcaaaggccacgacggactgtaccagggactcagca |
| | | ccgccaccaaggacacctatgacgctcttcacatgcagg |
| | | ccctgccgcctcgg (SEQ ID NO: 172) |
| SP-Linker 1- | MALPVTALLLPLALLLHAARPR | atggccctccctgtcaccgccctgctgcttccgctggctcttc |
| ERmut1-Furin | SSLALSLTADQMVSALLDAEP | tgctccacgccgctcggccccggtcgTcgttggcactttcc |
| cleavage site 1- | PILYSEYDPTRPFSEASMMGL | ctgactgccgaccagatggtgtccgcccttctggacgccg |
| BCMA CAR | LTNLADRELVHMINWAKRVPG | agcctccaattctgtactcggagtacgatccgactcgcccg |
| | FVDLALHDQVHLLECAWMEIL | ttctccgaagccagcatgatgggcctgttgactaacctggc |
| | MIGLVWRSMEHPGKLLFAPNL | ggaccgcgagttggtgcacatgattaactgggctaagcgg |
| | LLDRNQGKCVEGGVEIFDMLL | gtgccgggcttcgtggacctggccctgcacgaccaagtgc |
| | ATSSRFRMMNLQGEEFVCLK | acctcctggaatgcgcctggatggaaatcctcatgatcgg |
| | SIILLNSGVYTFLSSTLKSLEEK | cctcgtgtggagatccatggagcatcccggaaagctcctg |
| | DHIHRVLDKITDTLIHLMAKAG | tttgcacccaacctcctgcttgatcgcaaccagggaaaatg |
| | LTLQQQHQRLAQLLLILSHIRH | cgtggaagggggtgtcgagattttcgacatgctgctcgcca |
| | MSSKRMEHLYSMKCKNVVPL | cctcttcccggttccggatgatgaatctgcagggagaaga |
| | SDLLLEMLDAHRLRTKREVQL | gttcgtgtgtctgaagtcaatcatcctgctgaactccggggt |
| | VESGGGLVQPGGSLRLSCAV | ctataccttcctgagctcgaccctcaagtcactggaggaaa |
| | SGFALSNHGMSWVRRAPGK | aagaccacatccatcgcgtgctcgataagatcaccgaca |
| | GLEWVSGIVYSGSTYYAASVK | cccttatccatctcatggcgaaggctggactgaccctgcaa |
| | GRFTISRDNSRNTLYLQMNSL | cagcagcaccagaggctggcccagttgctgctgattctga |
| | RPEDTAIYYCSAHGGESDVW | gccacatccggcacatgtcgtccaagaggatggaacacc |
| | GQGTTVTVSSASGGGGSGG | tgtacagcatgaagtgcaagaacgtcgtgcctctgtccgat |
| | RASGGGGSDIQLTQSPSSLSA | ctgctcctggaaatgctggacgcgcacagactccgtacta |
| | SVGDRVTITCRASQSISSYLN | aaagagaagtgcaattggtggaatcagggggaggacttg |
| | WYQQKPGKAPKLLIYAASSLQ | tgcagcctggaggatcgctgagactgtcatgtgccgtgtcc |
| | SGVPSRFSGSGSGTDFTLTIS | ggctttgccctgtccaaccacgggatgtcctgggtccgccg |
| | SLQPEDFATYYCQQSYSTPYT | cgcgcctggaaagggcctcgaatgggtgtcgggtattgtgt |
| | FGQGTKVEIKTTTPAPRPPTP | acagcggtagcacctactatgccgcatccgtgaagggga |
| | APTIASQPLSLRPEACRPAAG | gattcaccatcagccgggacaactccaggaacactctgta |
| | GAVHTRGLDFACDIYIWAPLA | cctccaaatgaattcgctgaggccagaggacactgccatc |
| | GTCGVLLLSLVITLYCKRGRKK | tactactgctccgcgcatggcggagagtccgacgtctggg |
| | LLYIFKQPFMRPVQTTQEEDG | gacaggggaccaccgtgaccgtgtctagcgcgtccggcg |
| | CSCRFPEEEEGGCELRVKFS | gaggcggcagcgggggtcgggcatcagggggcggcgg |
| | RSADAPAYQQGQNQLYNELN | atcggacatccagctcacccagtccccgagctcgctgtcc |
| | LGRREEYDVLDKRRGRDPEM | gcctccgtgggagatcgggtcaccatcacgtgccgcgcc |
| | GGKPRRKNPQEGLYNELQKD | agccagtcgatttcctcctacctgaactggtaccaacagaa |
| | KMAEAYSEIGMKGERRRGKG | gcccggaaaagccccgaagcttctcatctacgccgcctc |
| | HDGLYQGLSTATKDTYDALH | gagcctgcagtcaggagtgccctcacggttctccggctcc |
| | MQALPPR | ggttccggtactgatttcaccctgaccatttcctccctgcaac |
| | (SEQ ID NO: 173) | cggaggacttcgctacttactactgccagcagtcgtactcc |
| | | accccctacactttcggacaaggcaccaaggtcgaaatc |
| | | aagaccactaccccagcaccgaggccacccaccccgg |
| | | ctcctaccatcgcctcccagcctctgtccctgcgtccggag |
| | | gcatgtagacccgcagctggtggggccgtgcatacccgg |
| | | ggtcttgacttcgcctgcgatatctacatttgggcccctctgg |
| | | ctggtacttgcggggtcctgctgctttcactcgtgatcactcttt |
| | | actgtaagcgcggtcggaagaagctgctgtacatctttaag |
| | | caacccttcatgaggcctgtgcagactactcaagaggag |
| | | gacggctgttcatgccggttcccagaggaggaggaaggc |
| | | ggctgcgaactgcgcgtgaaattcagccgcagcgcagat |
| | | gctccagcctaccagcaggggcagaaccagctctacaa |
| | | cgaactcaatcttggtcggagagaggagtacgacgtgctg |
| | | gacaagcggagaggacgggacccagaaatgggcggg |
| | | aagccgcgcagaaagaatccccaagagggcctgtaca |
| | | acgagctccaaaaggataagatggcagaagcctatagc |
| | | gagattggtatgaaaggggaacgcagaagaggcaaag |
| | | gccacgacggactgtaccagggactcagcaccgccacc |
| | | aaggacacctatgacgctcttcacatgcaggccctgccgc |
| | | ctcgg (SEQ ID NO: 174) |
| SP-Linker 1- | MALPVTALLLPLALLLHAARPR | atggccctccctgtcaccgccctgctgcttccgctggctcttc |
| ERmut1-Furin | SSLALSLTADQMVSALLDAEP | tgctccacgccgctcggccccggtcgTcgttggcactttcc |
| cleavage site 2- | PILYSEYDPTRPFSEASMMGL | ctgactgccgaccagatggtgtccgcccttctggacgccg |
| BCMA CAR | LTNLADRELVHMINWAKRVPG | agcctccaattctgtactcggagtacgatccgactcgcccg |
| (construct 164) | FVDLALHDQVHLLECAWMEIL | ttctccgaagccagcatgatgggcctgttgactaacctggc |
| | MIGLVWRSMEHPGKLLFAPNL | ggaccgcgagttggtgcacatgattaactgggctaagcgg |
| | LLDRNQGKCVEGGVEIFDMLL | gtgccgggcttcgtggacctggccctgcacgaccaagtgc |
| | ATSSRFRMMNLQGEEFVCLK | acctcctggaatgcgcctggatggaaatcctcatgatcgg |
| | SIILLNSGVYTFLSSTLKSLEEK | cctcgtgtggagatccatggagcatcccggaaagctcctg |
| | DHIHRVLDKITDTLIHLMAKAG | tttgcacccaacctcctgcttgatcgcaaccagggaaaatg |
| | LTLQQQHQRLAQLLLILSHIRH | cgtggaagggggtgtcgagattttcgacatgctgctcgcca |
| | MSSKRMEHLYSMKCKNVVPL | cctcttcccggttccggatgatgaatctgcagggagaaga |
| | SDLLLEMLDAHRLGTGAEDPR | gttcgtgtgtctgaagtcaatcatcctgctgaactccggggt |
| | PSRKRRSLGDVGEVQLVESG | ctataccttcctgagctcgaccctcaagtcactggaggaaa |
| | GGLVQPGGSLRLSCAVSGFA | aagaccacatccatcgcgtgctcgataagatcaccgaca |
| | LSNHGMSWVRRAPGKGLEW | cccttatccatctcatggcgaaggctggactgaccctgcaa |
| | VSGIVYSGSTYYAASVKGRFTI | cagcagcaccagaggctggcccagttgctgctgattctga |
| | SRDNSRNTLYLQMNSLRPED | gccacatccggcacatgtcgtccaagaggatggaacacc |
| | TAIYYCSAHGGESDVWGQGT | tgtacagcatgaagtgcaagaacgtcgtgcctctgtccgat |
| | TVTVSSASGGGGSGGRASGG | ctgctcctggaaatgctggacgcgcacagactcggaacc |
| | GGSDIQLTQSPSSLSASVGDR | ggcgcggaagacccccggccctccaggaagcgaaggt |
| | VTITCRASQSISSYLNWYQQK | ccctcggagacgtgggtgaagtgcaattggtggaatcag |
| | PGKAPKLLIYAASSLQSGVPS | ggggaggacttgtgcagcctggaggatcgctgagactgtc |
| | RFSGSGSGTDFTLTISSLQPE | atgtgccgtgtccggctttgccctgtccaaccacgggatgtc |
| | DFATYYCQQSYSTPYTFGQG | ctgggtccgccgcgcgcctggaaagggcctcgaatgggt |
| | TKVEIKTTTPAPRPPTPAPTIA | gtcgggtattgtgtacagcggtagcacctactatgccgcat |
| | SQPLSLRPEACRPAAGGAVH | ccgtgaaggggagattcaccatcagccgggacaactcc |
| | TRGLDFACDIYIWAPLAGTCG | aggaacactctgtacctccaaatgaattcgctgaggccag |
| | VLLLSLVITLYCKRGRKKLLYIF | aggacactgccatctactactgctccgcgcatggcggaga |
| | KQPFMRPVQTTQEEDGCSCR | gtccgacgtctggggacaggggaccaccgtgaccgtgtc |
| | FPEEEEGGCELRVKFSRSAD | tagcgcgtccggcggaggcggcagcgggggtcgggcat |
| | APAYQQGQNQLYNELNLGRR | cagggggcggcggatcggacatccagctcacccagtcc |
| | EEYDVLDKRRGRDPEMGGKP | ccgagctcgctgtccgcctccgtgggagatcgggtcacca |
| | RRKNPQEGLYNELQKDKMAE | tcacgtgccgcgccagccagtcgatttcctcctacctgaac |
| | AYSEIGMKGERRRGKGHDGL | tggtaccaacagaagcccggaaaagccccgaagcttctc |
| | YQGLSTATKDTYDALHMQALP | atctacgccgcctcgagcctgcagtcaggagtgccctcac |
| | PR (SEQ ID NO: 175) | ggttctccggctccggttccggtactgatttcaccctgaccat |
| | | ttcctccctgcaaccggaggacttcgctacttactactgcca |
| | | gcagtcgtactccaccccctacactttcggacaaggcacc |
| | | aaggtcgaaatcaagaccactaccccagcaccgaggcc |
| | | acccaccccggctcctaccatcgcctcccagcctctgtccc |
| | | tgcgtccggaggcatgtagacccgcagctggtggggccg |
| | | tgcatacccggggtcttgacttcgcctgcgatatctacatttg |
| | | ggcccctctggctggtacttgcggggtcctgctgctttcactc |
| | | gtgatcactctttactgtaagcgcggtcggaagaagctgct |
| | | gtacatctttaagcaacccttcatgaggcctgtgcagacta |
| | | ctcaagaggaggacggctgttcatgccggttcccagagg |
| | | aggaggaaggcggctgcgaactgcgcgtgaaattcagc |
| | | cgcagcgcagatgctccagcctaccagcaggggcagaa |
| | | ccagctctacaacgaactcaatcttggtcggagagagga |
| | | gtacgacgtgctggacaagcggagaggacgggaccca |
| | | gaaatgggcgggaagccgcgcagaaagaatccccaag |
| | | agggcctgtacaacgagctccaaaaggataagatggca |
| | | gaagcctatagcgagattggtatgaaaggggaacgcag |
| | | aagaggcaaaggccacgacggactgtaccagggactc |
| | | agcaccgccaccaaggacacctatgacgctcttcacatg |
| | | caggccctgccgcctcgg (SEQ ID NO: 176) |
| SP-Linker 1- | MALPVTALLLPLALLLHAARPR | atggccctccctgtcaccgccctgctgcttccgctggctcttc |
| ERmut1-Furin | SSLALSLTADQMVSALLDAEP | tgctccacgccgctcggccccggtcgTcgttggcactttcc |
| cleavage site 3- | PILYSEYDPTRPFSEASMMGL | ctgactgccgaccagatggtgtccgcccttctggacgccg |
| BCMA CAR | LTNLADRELVHMINWAKRVPG | agcctccaattctgtactcggagtacgatccgactcgcccg |
| | FVDLALHDQVHLLECAWMEIL | ttctccgaagccagcatgatgggcctgttgactaacctggc |
| | MIGLVWRSMEHPGKLLFAPNL | ggaccgcgagttggtgcacatgattaactgggctaagcgg |
| | LLDRNQGKCVEGGVEIFDMLL | gtgccgggcttcgtggacctggccctgcacgaccaagtgc |
| | ATSSRFRMMNLQGEEFVCLK | acctcctggaatgcgcctggatggaaatcctcatgatcgg |
| | SIILLNSGVYTFLSSTLKSLEEK | cctcgtgtggagatccatggagcatcccggaaagctcctg |
| | DHIHRVLDKITDTLIHLMAKAG | tttgcacccaacctcctgcttgatcgcaaccagggaaaatg |
| | LTLQQQHQRLAQLLLILSHIRH | cgtggaagggggtgtcgagattttcgacatgctgctcgcca |
| | MSSKRMEHLYSMKCKNVVPL | cctcttcccggttccggatgatgaatctgcagggagaaga |
| | SDLLLEMLDAHRLGTGAEDPR | gttcgtgtgtctgaagtcaatcatcctgctgaactccggggt |
| | PSRKRREVQLVESGGGLVQP | ctataccttcctgagctcgaccctcaagtcactggaggaaa |
| | GGSLRLSCAVSGFALSNHGM | aagaccacatccatcgcgtgctcgataagatcaccgaca |
| | SWVRRAPGKGLEWVSGIVYS | cccttatccatctcatggcgaaggctggactgaccctgcaa |
| | GSTYYAASVKGRFTISRDNSR | cagcagcaccagaggctggcccagttgctgctgattctga |
| | NTLYLQMNSLRPEDTAIYYCS | gccacatccggcacatgtcgtccaagaggatggaacacc |
| | AHGGESDVWGQGTTVTVSSA | tgtacagcatgaagtgcaagaacgtcgtgcctctgtccgat |
| | SGGGGSGGRASGGGGSDIQL | ctgctcctggaaatgctggacgcgcacagactcGggacg |
| | TQSPSSLSASVGDRVTITCRA | ggagctgaagatccacgacccagcagaaagcgacggg |
| | SQSISSYLNWYQQKPGKAPKL | aagtgcaattggtggaatcagggggaggacttgtgcagc |
| | LIYAASSLQSGVPSRFSGSGS | ctggaggatcgctgagactgtcatgtgccgtgtccggctttg |
| | GTDFTLTISSLQPEDFATYYC | ccctgtccaaccacgggatgtcctgggtccgccgcgcgcc |
| | QQSYSTPYTFGQGTKVEIKTT | tggaaagggcctcgaatgggtgtcgggtattgtgtacagc |
| | TPAPRPPTPAPTIASQPLSLRP | ggtagcacctactatgccgcatccgtgaaggggagattca |
| | EACRPAAGGAVHTRGLDFAC | ccatcagccgggacaactccaggaacactctgtacctcc |
| | DIYIWAPLAGTCGVLLLSLVITL | aaatgaattcgctgaggccagaggacactgccatctacta |
| | YCKRGRKKLLYIFKQPFMRPV | ctgctccgcgcatggcggagagtccgacgtctggggaca |
| | QTTQEEDGCSCRFPEEEEGG | ggggaccaccgtgaccgtgtctagcgcgtccggcggag |
| | CELRVKFSRSADAPAYQQGQ | gcggcagcgggggtcgggcatcagggggcggcggatc |
| | NQLYNELNLGRREEYDVLDK | ggacatccagctcacccagtccccgagctcgctgtccgcc |
| | RRGRDPEMGGKPRRKNPQE | tccgtgggagatcgggtcaccatcacgtgccgcgccagc |
| | GLYNELQKDKMAEAYSEIGMK | cagtcgatttcctcctacctgaactggtaccaacagaagcc |
| | GERRRGKGHDGLYQGLSTAT | cggaaaagccccgaagcttctcatctacgccgcctcgag |
| | KDTYDALHMQALPPR (SEQ | cctgcagtcaggagtgccctcacggttctccggctccggtt |
| | ID NO: 177) | ccggtactgatttcaccctgaccatttcctccctgcaaccgg |
| | | aggacttcgctacttactactgccagcagtcgtactccacc |
| | | ccctacactttcggacaaggcaccaaggtcgaaatcaag |
| | | accactaccccagcaccgaggccacccaccccggctcct |
| | | accatcgcctcccagcctctgtccctgcgtccggaggcatg |
| | | tagacccgcagctggtggggccgtgcatacccggggtctt |
| | | gacttcgcctgcgatatctacatttgggcccctctggctggta |
| | | cttgcggggtcctgctgctttcactcgtgatcactctttactgta |
| | | agcgcggtcggaagaagctgctgtacatctttaagcaacc |
| | | cttcatgaggcctgtgcagactactcaagaggaggacgg |
| | | ctgttcatgccggttcccagaggaggaggaaggcggctg |
| | | cgaactgcgcgtgaaattcagccgcagcgcagatgctcc |
| | | agcctaccagcaggggcagaaccagctctacaacgaac |
| | | tcaatcttggtcggagagaggagtacgacgtgctggaca |
| | | agcggagaggacgggacccagaaatgggcgggaagc |
| | | cgcgcagaaagaatccccaagagggcctgtacaacga |
| | | gctccaaaaggataagatggcagaagcctatagcgaga |
| | | ttggtatgaaaggggaacgcagaagaggcaaaggcca |
| | | cgacggactgtaccagggactcagcaccgccaccaagg |
| | | acacctatgacgctcttcacatgcaggccctgccgcctcg |
| | | g (SEQ ID NO: 178) |
| SP-Linker 1- | MALPVTALLLPLALLLHAARPR | atggccctccctgtcaccgccctgctgcttccgctggctcttc |
| ERmut2-Furin | SSLALSLTADQMVSALLDAEP | tgctccacgccgctcggccccggtcgTcgttggcactttcc |
| cleavage site 1- | PILYSEYDPTRPFSEASMMGL | ctgactgccgaccagatggtgtccgcccttctggacgccg |
| BCMA CAR | LTNLADRELVHMINWAKRVPG | agcctccaattctgtactcggagtacgatccgactcgcccg |
| | FVDLTLHDQVHLLECAWMEIL | ttctccgaagccagcatgatgggcctgttgactaacctggc |
| | MIGLVWRSMEHPGKLLFAPNL | ggaccgcgagttggtgcacatgattaactgggctaagcgg |
| | LLDRNQGKCVEGGVEIFDMLL | gtgccgggcttcgtggacctgaccctgcacgaccaagtgc |
| | ATSSRFRMMNLQGEEFVCLK | acctcctggaatgcgcctggatggaaatcctcatgatcgg |
| | SIILLNSGVYTFLSSTLKSLEEK | cctcgtgtggagatccatggagcatcccggaaagctcctg |
| | DHIHRVLDKITDTLIHLMAKAG | tttgcacccaacctcctgcttgatcgcaaccagggaaaatg |
| | LTLQQQHQRLAQLLLILSHIRH | cgtggaagggggtgtcgagattttcgacatgctgctcgcca |
| | MSNKRMEHLYSMKCKNVVPL | cctcttcccggttccggatgatgaatctgcagggagaaga |
| | SDLLLEMLDAHRLRTKREVQL | gttcgtgtgtctgaagtcaatcatcctgctgaactccggggt |
| | VESGGGLVQPGGSLRLSCAV | ctataccttcctgagctcgaccctcaagtcactggaggaaa |
| | SGFALSNHGMSWVRRAPGK | aagaccacatccatcgcgtgctcgataagatcaccgaca |
| | GLEWVSGIVYSGSTYYAASVK | cccttatccatctcatggcgaaggctggactgaccctgcaa |
| | GRFTISRDNSRNTLYLQMNSL | cagcagcaccagaggctggcccagttgctgctgattctga |
| | RPEDTAIYYCSAHGGESDVW | gccacatccggcacatgtcgaacaagaggatggaacac |
| | GQGTTVTVSSASGGGGSGG | ctgtacagcatgaagtgcaagaacgtcgtgcctctgtccg |
| | RASGGGGSDIQLTQSPSSLSA | atctgctcctggaaatgctggacgcgcacagactccgtact |
| | SVGDRVTITCRASQSISSYLN | aaaagagaagtgcaattggtggaatcagggggaggactt |
| | WYQQKPGKAPKLLIYAASSLQ | gtgcagcctggaggatcgctgagactgtcatgtgccgtgtc |
| | SGVPSRFSGSGSGTDFTLTIS | cggctttgccctgtccaaccacgggatgtcctgggtccgcc |
| | SLQPEDFATYYCQQSYSTPYT | gcgcgcctggaaagggcctcgaatgggtgtcgggtattgt |
| | FGQGTKVEIKTTTPAPRPPTP | gtacagcggtagcacctactatgccgcatccgtgaaggg |
| | APTIASQPLSLRPEACRPAAG | gagattcaccatcagccgggacaactccaggaacactct |
| | GAVHTRGLDFACDIYIWAPLA | gtacctccaaatgaattcgctgaggccagaggacactgc |
| | GTCGVLLLSLVITLYCKRGRKK | catctactactgctccgcgcatggcggagagtccgacgtct |
| | LLYIFKQPFMRPVQTTQEEDG | ggggacaggggaccaccgtgaccgtgtctagcgcgtcc |
| | CSCRFPEEEEGGCELRVKFS | ggcggaggcggcagcgggggtcgggcatcagggggcg |
| | RSADAPAYQQGQNQLYNELN | gcggatcggacatccagctcacccagtccccgagctcgc |
| | LGRREEYDVLDKRRGRDPEM | tgtccgcctccgtgggagatcgggtcaccatcacgtgccg |
| | GGKPRRKNPQEGLYNELQKD | cgccagccagtcgatttcctcctacctgaactggtaccaac |
| | KMAEAYSEIGMKGERRRGKG | agaagcccggaaaagccccgaagcttctcatctacgccg |
| | HDGLYQGLSTATKDTYDALH | cctcgagcctgcagtcaggagtgccctcacggttctccgg |
| | MQALPPR (SEQ ID NO: 179) | ctccggttccggtactgatttcaccctgaccatttcctccctgc |
| | | aaccggaggacttcgctacttactactgccagcagtcgtac |
| | | tccaccccctacactttcggacaaggcaccaaggtcgaa |
| | | atcaagaccactaccccagcaccgaggccacccacccc |
| | | ggctcctaccatcgcctcccagcctctgtccctgcgtccgg |
| | | aggcatgtagacccgcagctggtggggccgtgcataccc |
| | | ggggtcttgacttcgcctgcgatatctacatttgggcccctct |
| | | ggctggtacttgcggggtcctgctgctttcactcgtgatcact |
| | | ctttactgtaagcgcggtcggaagaagctgctgtacatcttt |
| | | aagcaacccttcatgaggcctgtgcagactactcaagag |
| | | gaggacggctgttcatgccggttcccagaggaggaggaa |
| | | ggcggctgcgaactgcgcgtgaaattcagccgcagcgc |
| | | agatgctccagcctaccagcaggggcagaaccagctcta |
| | | caacgaactcaatcttggtcggagagaggagtacgacgt |
| | | gctggacaagcggagaggacgggacccagaaatgggc |
| | | gggaagccgcgcagaaagaatccccaagagggcctgt |
| | | acaacgagctccaaaaggataagatggcagaagcctat |
| | | agcgagattggtatgaaaggggaacgcagaagaggca |
| | | aaggccacgacggactgtaccagggactcagcaccgcc |
| | | accaaggacacctatgacgctcttcacatgcaggccctgc |
| | | cgcctcgg (SEQ ID NO: 180) |
| SP-Linker 1- | MALPVTALLLPLALLLHAARPR | atggccctccctgtcaccgccctgctgcttccgctggctcttc |
| ERmut2-Furin | SSLALSLTADQMVSALLDAEP | tgctccacgccgctcggccccggtcgTcgttggcactttcc |
| cleavage site 2- | PILYSEYDPTRPFSEASMMGL | ctgactgccgaccagatggtgtccgcccttctggacgccg |
| BCMA CAR | LTNLADRELVHMINWAKRVPG | agcctccaattctgtactcggagtacgatccgactcgcccg |
| | FVDLTLHDQVHLLECAWMEIL | ttctccgaagccagcatgatgggcctgttgactaacctggc |
| | MIGLVWRSMEHPGKLLFAPNL | ggaccgcgagttggtgcacatgattaactgggctaagcgg |
| | LLDRNQGKCVEGGVEIFDMLL | gtgccgggcttcgtggacctgaccctgcacgaccaagtgc |
| | ATSSRFRMMNLQGEEFVCLK | acctcctggaatgcgcctggatggaaatcctcatgatcgg |
| | SIILLNSGVYTFLSSTLKSLEEK | cctcgtgtggagatccatggagcatcccggaaagctcctg |
| | DHIHRVLDKITDTLIHLMAKAG | tttgcacccaacctcctgcttgatcgcaaccagggaaaatg |
| | LTLQQQHQRLAQLLLILSHIRH | cgtggaagggggtgtcgagattttcgacatgctgctcgcca |
| | MSNKRMEHLYSMKCKNVVPL | cctcttcccggttccggatgatgaatctgcagggagaaga |
| | SDLLLEMLDAHRLGTGAEDPR | gttcgtgtgtctgaagtcaatcatcctgctgaactccggggt |
| | PSRKRRSLGDVGEVQLVESG | ctataccttcctgagctcgaccctcaagtcactggaggaaa |
| | GGLVQPGGSLRLSCAVSGFA | aagaccacatccatcgcgtgctcgataagatcaccgaca |
| | LSNHGMSWVRRAPGKGLEW | cccttatccatctcatggcgaaggctggactgaccctgcaa |
| | VSGIVYSGSTYYAASVKGRFTI | cagcagcaccagaggctggcccagttgctgctgattctga |
| | SRDNSRNTLYLQMNSLRPED | gccacatccggcacatgtcgaacaagaggatggaacac |
| | TAIYYCSAHGGESDVWGQGT | ctgtacagcatgaagtgcaagaacgtcgtgcctctgtccg |
| | TVTVSSASGGGGSGGRASGG | atctgctcctggaaatgctggacgcgcacagactcggaa |
| | GGSDIQLTQSPSSLSASVGDR | ccggcgcggaagacccccggccctccaggaagcgaag |
| | VTITCRASQSISSYLNWYQQK | gtccctcggagacgtgggtgaagtgcaattggtggaatca |
| | PGKAPKLLIYAASSLQSGVPS | gggggaggacttgtgcagcctggaggatcgctgagactg |
| | RFSGSGSGTDFTLTISSLQPE | tcatgtgccgtgtccggctttgccctgtccaaccacgggatg |
| | DFATYYCQQSYSTPYTFGQG | tcctgggtccgccgcgcgcctggaaagggcctcgaatgg |
| | TKVEIKTTTPAPRPPTPAPTIA | gtgtcgggtattgtgtacagcggtagcacctactatgccgc |
| | SQPLSLRPEACRPAAGGAVH | atccgtgaaggggagattcaccatcagccgggacaactc |
| | TRGLDFACDIYIWAPLAGTCG | caggaacactctgtacctccaaatgaattcgctgaggcca |
| | VLLLSLVITLYCKRGR | gaggacactgccatctactactgctccgcgcatggcggag |
| | KKLLYIFKQPFMRPVQTTQEE | agtccgacgtctggggacaggggaccaccgtgaccgtgt |
| | DGCSCRFPEEEEGGCELRVK | ctagcgcgtccggcggaggcggcagcgggggtcgggc |
| | FSRSADAPAYQQGQNQLYNE | atcagggggcggcggatcggacatccagctcacccagtc |
| | LNLGRREEYDVLDKRRGRDP | cccgagctcgctgtccgcctccgtgggagatcgggtcacc |
| | EMGGKPRRKNPQEGLYNELQ | atcacgtgccgcgccagccagtcgatttcctcctacctgaa |
| | KDKMAEAYSEIGMKGERRRG | ctggtaccaacagaagcccggaaaagccccgaagcttct |
| | KGHDGLYQGLSTATKDTYDAL | catctacgccgcctcgagcctgcagtcaggagtgccctca |
| | HMQALPPR | cggttctccggctccggttccggtactgatttcaccctgacc |
| | (SEQ ID NO: 181) | atttcctccctgcaaccggaggacttcgctacttactactgc |
| | | cagcagtcgtactccaccccctacactttcggacaaggca |
| | | ccaaggtcgaaatcaagaccactaccccagcaccgagg |
| | | ccacccaccccggctcctaccatcgcctcccagcctctgtc |
| | | cctgcgtccggaggcatgtagacccgcagctggtggggc |
| | | cgtgcatacccggggtcttgacttcgcctgcgatatctacatt |
| | | tgggcccctctggctggtacttgcggggtcctgctgctttcac |
| | | tcgtgatcactctttactgtaagcgcggtcggaagaagctg |
| | | ctgtacatctttaagcaacccttcatgaggcctgtgcagact |
| | | actcaagaggaggacggctgttcatgccggttcccagag |
| | | gaggaggaaggcggctgcgaactgcgcgtgaaattcag |
| | | ccgcagcgcagatgctccagcctaccagcaggggcaga |
| | | accagctctacaacgaactcaatcttggtcggagagagg |
| | | agtacgacgtgctggacaagcggagaggacgggaccc |
| | | agaaatgggcgggaagccgcgcagaaagaatccccaa |
| | | gagggcctgtacaacgagctccaaaaggataagatggc |
| | | agaagcctatagcgagattggtatgaaaggggaacgca |
| | | gaagaggcaaaggccacgacggactgtaccagggact |
| | | cagcaccgccaccaaggacacctatgacgctcttcacat |
| | | gcaggccctgccgcctcgg (SEQ ID NO: 182) |
| SP-Linker 1- | MALPVTALLLPLALLLHAARPR | atggccctccctgtcaccgccctgctgcttccgctggctcttc |
| ERmut2-Furin | SSLALSLTADQMVSALLDAEP | tgctccacgccgctcggccccggtcgTcgttggcactttcc |
| cleavage site 3- | PILYSEYDPTRPFSEASMMGL | ctgactgccgaccagatggtgtccgcccttctggacgccg |
| BCMA CAR | LTNLADRELVHMINWAKRVPG | agcctccaattctgtactcggagtacgatccgactcgcccg |
| | FVDLTLHDQVHLLECAWMEIL | ttctccgaagccagcatgatgggcctgttgactaacctggc |
| | MIGLVWRSMEHPGKLLFAPNL | ggaccgcgagttggtgcacatgattaactgggctaagcgg |
| | LLDRNQGKCVEGGVEIFDMLL | gtgccgggcttcgtggacctgaccctgcacgaccaagtgc |
| | ATSSRFRMMNLQGEEFVCLK | acctcctggaatgcgcctggatggaaatcctcatgatcgg |
| | SIILLNSGVYTFLSSTLKSLEEK | cctcgtgtggagatccatggagcatcccggaaagctcctg |
| | DHIHRVLDKITDTLIHLMAKAG | tttgcacccaacctcctgcttgatcgcaaccagggaaaatg |
| | LTLQQQHQRLAQLLLILSHIRH | cgtggaagggggtgtcgagattttcgacatgctgctcgcca |
| | MSNKRMEHLYSMKCKNVVPL | cctcttcccggttccggatgatgaatctgcagggagaaga |
| | SDLLLEMLDAHRLGTGAEDPR | gttcgtgtgtctgaagtcaatcatcctgctgaactccggggt |
| | PSRKRREVQLVESGGGLVQP | ctataccttcctgagctcgaccctcaagtcactggaggaaa |
| | GGSLRLSCAVSGFALSNHGM | aagaccacatccatcgcgtgctcgataagatcaccgaca |
| | SWVRRAPGKGLEWVSGIVYS | cccttatccatctcatggcgaaggctggactgaccctgcaa |
| | GSTYYAASVKGRFTISRDNSR | cagcagcaccagaggctggcccagttgctgctgattctga |
| | NTLYLQMNSLRPEDTAIYYCS | gccacatccggcacatgtcgaacaagaggatggaacac |
| | AHGGESDVWGQGTTVTVSSA | ctgtacagcatgaagtgcaagaacgtcgtgcctctgtccg |
| | SGGGGSGGRASGGGGSDIQL | atctgctcctggaaatgctggacgcgcacagactcggga |
| | TQSPSSLSASVGDRVTITCRA | cgggagctgaagatccacgacccagcagaaagcgacg |
| | SQSISSYLNWYQQKPGKAPKL | ggaagtgcaattggtggaatcagggggaggacttgtgca |
| | LIYAASSLQSGVPSRFSGSGS | gcctggaggatcgctgagactgtcatgtgccgtgtccggct |
| | GTDFTLTISSLQPEDFATYYC | ttgccctgtccaaccacgggatgtcctgggtccgccgcgc |
| | QQSYSTPYTFGQGTKVEIKTT | gcctggaaagggcctcgaatgggtgtcgggtattgtgtac |
| | TPAPRPPTPAPTIASQPLSLRP | agcggtagcacctactatgccgcatccgtgaaggggaga |
| | EACRPAAGGAVHTRGLDFAC | ttcaccatcagccgggacaactccaggaacactctgtacc |
| | DIYIWAPLAGTCGVLLLSLVITL | tccaaatgaattcgctgaggccagaggacactgccatcta |
| | YCKRGRKKLLYIFKQPFMRPV | ctactgctccgcgcatggcggagagtccgacgtctgggg |
| | QTTQEEDGCSCRFPEEEEGG | acaggggaccaccgtgaccgtgtctagcgcgtccggcgg |
| | CELRVKFSRSADAPAYQQGQ | aggcggcagcgggggtcgggcatcagggggcggcgga |
| | NQLYNELNLGRREEYDVLDK | tcggacatccagctcacccagtccccgagctcgctgtccg |
| | RRGRDPEMGGKPRRKNPQE | cctccgtgggagatcgggtcaccatcacgtgccgcgcca |
| | GLYNELQKDKMAEAYSEIGMK | gccagtcgatttcctcctacctgaactggtaccaacagaag |
| | GERRRGKGHDGLYQGLSTAT | cccggaaaagccccgaagcttctcatctacgccgcctcg |
| | KDTYDALHMQALPPR (SEQ | agcctgcagtcaggagtgccctcacggttctccggctccg |
| | ID NO: 183) | gttccggtactgatttcaccctgaccatttcctccctgcaacc |
| | | ggaggacttcgctacttactactgccagcagtcgtactcca |
| | | ccccctacactttcggacaaggcaccaaggtcgaaatca |
| | | agaccactaccccagcaccgaggccacccaccccggct |
| | | cctaccatcgcctcccagcctctgtccctgcgtccggaggc |
| | | atgtagacccgcagctggtggggccgtgcatacccgggg |
| | | tcttgacttcgcctgcgatatctacatttgggcccctctggctg |
| | | gtacttgcggggtcctgctgctttcactcgtgatcactctttact |
| | | gtaagcgcggtcggaagaagctgctgtacatctttaagca |
| | | acccttcatgaggcctgtgcagactactcaagaggagga |
| | | cggctgttcatgccggttcccagaggaggaggaaggcgg |
| | | ctgcgaactgcgcgtgaaattcagccgcagcgcagatgc |
| | | tccagcctaccagcaggggcagaaccagctctacaacg |
| | | aactcaatcttggtcggagagaggagtacgacgtgctgg |
| | | acaagcggagaggacgggacccagaaatgggcggga |
| | | agccgcgcagaaagaatccccaagagggcctgtacaa |
| | | cgagctccaaaaggataagatggcagaagcctatagcg |
| | | agattggtatgaaaggggaacgcagaagaggcaaagg |
| | | ccacgacggactgtaccagggactcagcaccgccacca |
| | | aggacacctatgacgctcttcacatgcaggccctgccgcc |
| | | tcgg (SEQ ID NO: 184) |

[0975] Cell Lines and Cell Transduction

[0976] Jurkat cells were obtained from the ATCC and maintained in media according to supplier's recommendations. Jurkat cell lines were transduced by spinoculation with lentiviral supernatant from 293T cells transfected with the various plasmid DNAs.

[0977] Cancer Cells

[0978] NALM6, K562, Molm13 cell lines were obtained from the ATCC and maintained in media according to supplier's recommendations. To produce a bioluminescent model for T cell killing assays, all cells were transduced with a luciferase lentiviral construct and kept under antibiotic selection.

[0979] Compound Treatments

[0980] 4-hydroxytamoxifen (4-OHT) was resuspended in ethanol. Bazedoxifene and raloxifene were resuspended in DMSO. In all instances, where concentrations not indicated, compounds were added at 1 uM for 24 hours prior to analysis by flow cytometry.

[0981] Flow Cytometry

[0982] Cells were isolated from in vitro culture, washed once in PBS supplemented with 0.5% bovine serum albumin, and stained on ice using either biotinylated Protein L followed by incubated with a fluorochrome-conjugated streptavidin reagent or an antibody recognizing the given target antigen. In all analyses, the population of interest was gated based on forward vs side scatter characteristics, followed by singlet gating, and live cells were gated. Flow cytometry was performed on a four laser Fortessa (Becton-Dickinson).

[0983] Tumor Killing Assay

[0984] In brief, luciferase transduced target cell lines were co-cultured at the indicated ratios with effector CD19CAR, FurON-CD19CAR, CD123CAR, FurON-CD123 CAR T cells for 20 hours, in the presence or absence of bazedoxifene. Remaining luciferase activity was measured by adding Bright-Glo (Promega) on a luminescence reader (Envision). Percentage killing was calculated using negative controls.

[0985] Cytokine Secretion

[0986] Effector and luciferase transduced target cell lines were co-cultured at a 3:1 ratio in RPMI containing 10% FBS for 20 hours, in the presence or absence of bazedoxifene. Supernatant was analysed by 3-plex array according the manufacturer's instructions (Invitrogen).

[0987] Proliferation Assay

[0988] Effector and irradiated target cells were co-cultured for 4 days, in the presence or absence of bazedoxifene. Cells were then harvested, washed, and stained with an anti-CD3 antibody and/or protein L reagent to detect CAR surface expression. Cells were then washed, resuspended in FACS buffer and a fixed volume of Absolute Counting Beads are added to each sample. Samples were run on a Fortessa FACS analyzer and the same number of events in the Counting Beads gate was collected for all samples.

### Example 14: Evaluation of Different Furin Cleavage Sites within the Furin Degron Domain in the Context of CAR19 (Anti-CD19 ScFV CAR)

[0989] Gene fragments, comprising a furin degron domain fused to an anti-CD19 scFV CAR and preceded by a T7 promoter, were subjected to in vitro transcription/translation. The differences between gene fragments lay in the furin cleavage sites created, as annotated. The in vitro synthesized proteins were incubated with furin as indicated, at 37° C. for 1 hr. The samples were loaded onto a reducing SDS-PAGE gel and analyzed by immunoblotting using an anti-CD3ζ antibody.

[0990] FIGS. 12A-12B showed the degree of furin cleavage across the various tested furin cleavage sites, in the CAR19 context. The tested furin cleavage sites are: #105—LQWLEQQVAKRRTKR (SEQ ID NO: 129); #106—GTGAEDPRPSRKRRSLGDVG (SEQ ID NO: 125); #107—GTGAEDPRPSRKRRSLGG (SEQ ID NO: 131); #108—GTGAEDPRPSRKRRSLG (SEQ ID NO: 133); #102—SLNLTESHNSRKKR (SEQ ID NO: 135); #103—GTGAEDPRPSRKRR (SEQ ID NO: 127); #104—CKINGYPKRGRKRR (SEQ ID NO: 137); #73—RTKR (SEQ ID NO: 123). A gene fragment derived from the parental CAR19 was used as a control (Ctrl) and no cleavage was observed (FIGS. 12A-12B).

### Example 15: Compound Inducible CAR Expression in Primary Human T Cells

[0991] Primary human T cells were transduced with a furin degron domain fused to an anti-CD19 scFV CAR construct (construct #106). Untransduced T cells (UTD) and the parental CAR19 were used as controls. Cells were expanded for 10 days in the presence of anti-CD3/CD28 stimulation beads. 100U/mL IL-2 was added on day 7, bazedoxifene (BZA) was added on day 8. Prior to freezing down the cells, CAR expression was determined on day 10 by FACS using protein L staining. Cell number, size, and viability were also assessed.

[0992] The data demonstrated that the furin degron domain regulates CAR19 expression in a stabilizing compound-dependent manner in human primary T cells, with the MFI (mean fluorescence intensity) of the CAR being lower compared to the parental CAR construct (FIG. 13). Also, the furin degron domain had no impact on cell viability and cell proliferation (FIG. 13).

### Example 16: Compound-Dependent Furon CAR-Mediated Tumor Killing

[0993] Primary human T cells were transduced with a furin degron domain fused to an anti-CD19 scFV CAR (construct #106). Untransduced T cells (UTD) were used as control. The parental CAR19 construct was included as a benchmark for full CAR functional activity. Cells are expanded for 10 days in the presence of anti-CD3/CD28 stimulation beads. 100U/mL IL-2 was added on day 7, bazedoxifene was added on day 8 (samples CD19CAR+ and FurON 106+) or omitted (samples CD19CAR and FurON 106). Cells were frozen on day 10. T cells were thawed and co-cultured with the luciferized target cell lines (CD19+ NALM6 cells or CD19-K562 cells) and bazedoxifene, for 20 hours. CART cells were normalized to the same percentage of CAR expressing cells. Percent tumor lysis was determined by analysis of remaining luciferase activity.

[0994] These data demonstrated that CAR19 with the furin degron domain kills CD19+ tumor cells in a stabilizing compound dose-dependent manner and is noninferior to the parental CAR construct (FIG. 14).

### Example 17: Compound- and Tumor-Dependent Cytokine Secretion by the Furon CAR

[0995] Primary human T cells were transduced with a furin degron domain fused to an anti-CD19 scFV CAR (construct 106). Untransduced T cells (UTD) were used as control. The parental CAR19 construct was included as a benchmark for full CAR functional activity. Cells were expanded for 10 days in the presence of anti-CD3/CD28 stimulation beads. 100U/mL IL-2 was added on day 7, bazedoxifene (BAZ) was added on day 8 (samples CD19CAR+BAZ and FurON 106+BAZ) or omitted (samples CD19CAR and FurON 106). Cells were frozen on day 10. T cells were thawed and co-cultured with luciferized NALM6, a CD19+ target cell line, for 20 hours, and bazedoxifene as indicated. CART cells were normalized to the same percentage of CAR expressing cells. Supernatants were harvested and evaluated for levels of IFNγ.

[0996] These data demonstrated that primary human T cells expressing ERαFurON CAR19 secrete IFNγ in the presence of CD19+ tumor cells, in a manner that is stabilizing compound dose-dependent and is noninferior to the parental CAR19 construct (FIG. 15).

### Example 18: Compound- and Tumor-Dependent Proliferation of the Furon CAR

[0997] Primary human T cells were transduced with a furin degron domain fused to an anti-CD19 scFV CAR (construct 106). Untransduced T cells (UTD) were used as control. The parental CAR19 construct was included as a benchmark for full CAR functional activity. Cells were expanded for 10 days in the presence of anti-CD3/CD28 stimulation beads. 100U/mL IL-2 was added on day 7, bazedoxifene (Baz) was added on day 8 (samples CD19CAR+BAZ and FurON 106+BAZ) or omitted (samples CD19CAR and FurON 106). Cells were frozen on day 10. T cells were thawed and co-cultured with the luciferized target cell lines (CD19+ NALM6 cells or CD19-K562 cells) and bazedoxifene. CART cells were normalized to the same percentage of CAR expressing cells. After 4 days, the samples were analyzed by FACS and 3000 events in the counting beads gate were collected for all samples.

[0998] These data demonstrated that primary human T cells expressing ERαFurON CAR19 proliferate in the presence of CD19+ tumor cells, in a manner that is stabilizing compound-dependent and is noninferior to the parental CAR19 construct (FIG. 16).

### Example 19: Compound Inducible CAR Expression in Jurkat T Cells

[0999] Jurkat T cells were transduced with one of two furin degron domains fused to an anti-CD19 scFV CAR constructs. The two constructs share the same furin cleavage sequence but differ in the number of mutations in the degradation domain (ERmut1 or ERmut 2 shown in Table 23). The construct with more mutations was FurONCART19 #106 (with ERmut1); and the construct with fewer was FurONCART19 #130 (with ERmut2). The transduced cells were incubated with 4-OH tamoxifen, bazedoxifene, or raloxifene, at the indicated concentrations, for 42 hours. Expression of the anti-CD19 scFV was determined by FACS, using protein L.

[1000] These data demonstrated that the tested furin degron domains can regulate CAR19 expression in a stabilizing compound-dependent manner, regardless of the number of mutations; and no CAR surface expression is detected in the absence of compound (FIG. 17).

### Example 20: Compound Inducible CAR Expression in Human Primary T Cells

[1001] Primary human T cells were transduced with a furin degron domain fused to an anti-CD19 scFV CAR construct (construct #130). Untransduced T cells (UTDs) and the parental CAR19 were used as controls. Cells were expanded for 10 days in the presence of anti-CD3/CD28 stimulation beads. 100U/mL IL-2 was added on day 7 or omitted, bazedoxifene (BZA) was added on day 8. Prior to freezing down the cells, CAR expression was determined on day 10 by FACS, using protein L staining.

[1002] These data demonstrated that the FurON domain—comprising a limited number of mutations in the degron domain—regulates CAR19 expression in a stabilizing compound- and IL-2-dependent manner in human primary T cells (FIG. 18). Also, no surface CAR expression is detected in the absence of the stabilizing compound bazedoxifene, when the FurON moiety is fused to CAR19 (FIG. 18).

### Example 21: Compound-Dependent Furon Car-Mediated Tumor Killing

[1003] Primary human T cells were transduced with a furin degron domain fused to an anti-CD19 scFV CAR construct (construct #130). Untransduced T cells (UTDs) were used as control. The parental CAR19 construct was included as a benchmark for full CAR functional activity. Cells were expanded for 10 days in the presence of anti-CD3/CD28 stimulation beads. 100U/mL IL-2 was added on day 7. Bazedoxifene (BZA) was added on day 8 to a fraction of the FurON 130 BZA sample, so CAR expression can be determined on day 10 by FACS, using protein L staining, prior to freezing down the cells. T cells were thawed and co-cultured with the luciferized target cell lines (CD19+ NALM6 cells or CD19− K562 cells) for 20 hours, in the presence or absence of bazedoxifene. Different ratios of CART (“effector”) and target cells are used as indicated in the x-axis of FIGS. 19A-19B. CART cells were normalized to the same percentage of CAR expressing cells. Percent tumor lysis was determined by analysis of remaining luciferase activity.

[1004] These data demonstrated that CART cells expressing FurON CAR19 kill CD19+ tumor cells, comprising a limited number of mutations in the degron domain, in a stabilizing compound- and target-dependent manner and is noninferior to the parental CAR construct (FIGS. 19A-19B).

### Example 22: Compound- and Tumor-Dependent Cytokine Secretion by the Furon CAR

[1005] Primary human T cells were transduced with a furin degron domain fused to an anti-CD19 scFV CAR construct (construct #130). Untransduced T cells (UTDs) were used as control. The parental CAR19 construct was included as a benchmark for full CAR functional activity. Cells were expanded for 10 days in the presence of anti-CD3/CD28 stimulation beads. 100U/mL IL-2 was added on day 7. Bazedoxifene (BZA) was added on day 8 to a fraction of the FurON 130 BZA sample, so CAR expression can be determined on day 10 by FACS, using protein L staining, prior to freezing down the cells. Cells were frozen on day 10. T cells were thawed and co-cultured with the luciferized target cell lines (CD19+ NALM6 cells) for 20 hours, at a 5:1 effector:target ratio, in the presence or absence of bazedoxifene. CART cells were normalized to the same percentage of CAR expressing cells. Supernatants were harvested and evaluated for levels of IFNγ.

[1006] These data demonstrated that CART cells expressing FurON CAR19, comprising a limited number of mutations in the degron domain, secrete cytokines in the presence of CD19+ tumor cells, in a manner that is stabilizing compound-dependent and is noninferior to the parental CAR construct (FIG. 20).

### Example 23: Compound- and Tumor-Dependent T Cell Proliferation

[1007] Primary human T cells were transduced with a furin degron domain fused to an anti-CD19 scFV CAR (construct #130). Untransduced T cells (UTD) were used as control. The parental CAR19 construct was included as a benchmark for full CAR functional activity. Cells were expanded for 10 days in the presence of anti-CD3/CD28 stimulation beads. 100U/mL IL-2 was added on day 7. Bazedoxifene was added on day 8 to a fraction of the FurON 130 BZA sample, so CAR expression can be determined on day 10 by FACS, using protein L staining, prior to freezing down the cells. Cells were frozen on day 10. T cells were thawed and co-cultured with the indicated luciferized target cell lines for 4 days, in the presence or absence of bazedoxifene. CART cells were normalized to the same percentage of CAR expressing cells. After 4 days, the samples were analyzed by FACS and 3000 events in the counting beads gate are collected for all samples.

[1008] These data demonstrated that CD3+ T cells comprising FurON CAR19 proliferate in the presence of CD19+ tumor cells, in a manner that is stabilizing compound-dependent and is noninferior to the parental CAR construct (FIG. 21).

### Example 24: Compound Inducible CAR123 Expression in Primary Human T Cells

[1009] Primary human T cells were transduced with a furin degron domain fused to an anti-CD123 scFV CAR construct. Untransduced T cells (UTD) and the parental CAR123 were used as controls. Cells were expanded for 10 days in the presence of anti-CD3/CD28 stimulation beads. 100U/mL IL-2 was added on day 7, bazedoxifene (BZA) was added on day 8 (Furon123+BZA) or omitted (Furon123). Prior to freezing down the cells, CAR expression was determined on day 10 by FACS using protein L staining.

[1010] These data demonstrated that the FurON domain regulates CAR123 expression in primary human T cells, in a stabilizing compound-dependent manner (FIG. 22).

### Example 25: Compound-Dependent Car123-Mediated Tumor Killing

[1011] Primary human T cells were transduced with a furin degron domain fused to an anti-CD123 scFV CAR construct. Untransduced T cells (UTD) were used as control. The parental CAR123 construct was included as a benchmark for full CAR functional activity. Cells were expanded for 10 days in the presence of anti-CD3/CD28 stimulation beads. 100U/mL IL-2 was added on day 7, bazedoxifene (BZA) was added on day 8 (FurON123+ BZA) or omitted (FurON123). Prior to freezing down the cells, CAR expression was determined on day 10 by FACS, using protein L staining. T cells were thawed and co-cultured with the luciferized target cell lines for 20 hours, in the presence or absence of bazedoxifene. Molm13 is a CD123+ cell line; very low expression of CD123+ observed in K562cells. Different ratios of CART and target cells were used as indicated in the x-axis (E:T ratios) of FIG. 25. CART cells were normalized to the same percentage of CAR expressing cells. Percent tumor lysis was determined by analysis of remaining luciferase activity.

[1012] These data demonstrated that CART cells expressing FurON CAR123 kill CD123+ tumor cells, in a stabilizing compound- and target-dependent manner and is noninferior to the parental CAR construct (FIG. 23).

### Example 26: Compound- and Tumor-Dependent Ifn-γ Cytokine Secretion by the Furon CAR123

[1013] Primary human T cells were transduced with a furin degron domain fused to an anti-CD123 scFV CAR. Untransduced T cells (UTD) were used as control. The parental CAR123 construct was included as a benchmark for full CAR functional activity. Cells were expanded for 10 days in the presence of anti-CD3/CD28 stimulation beads. 100U/mL IL-2 was added on day 7, bazedoxifene (BZA) was added on day 8 (FurON123+ BZA) or omitted (FurON123). Cells were frozen on day 10. T cells were thawed and co-cultured with the luciferized target cell lines for 20 hrs at a 5:1 effector to target ratio, in the presence or absence of bazedoxifene. Molm13 is a CD123+ cell line; very low expression of CD123+ observed in K562cells. Supernatants were harvested and evaluated for levels of IFNγ.

[1014] These data demonstrated that CART cells expressing FurON CAR123 secrete cytokines in the presence of CD123+ tumor cells, in a manner that is stabilizing compound-dependent and is noninferior to the parental CAR construct (FIG. 24).

### Example 27: Furon CART19 is Effective Against CD19+ Tumor Cells in an Animal Model Only when Bazedoxifene is Dosed

[1015] Cell Line

[1016] NALM6 (RRID: CVCL_0092) is a human leukemia cell line that was derived from the peripheral blood of a 19-year-old man with acute lymphoblastic leukemia (ALL) in relapse in 1976. Cells were grown in RMPI medium containing 10% fetal bovine serum. This cell line grows in suspension in tissue culture flasks. This cell line persists and expands in mice when implanted intravenously. The NALM6 cells have been modified to express luciferase, so that that tumor cell growth can also be monitored by imaging the mice.

[1017] Mice

[1018] 6 week old NSG (NOD.Cg-Prkdc^{scid}II2rg^{tm1Wjl}/SzJ) mice were received from the Jackson Laboratory. Animals were allowed to acclimate in the NIBR animal facility for at least 3 days prior to experimentation. Animals were handled in accordance with Novartis ACUC regulations and guidelines. Electronic transponders for animal identification were implanted on the left flank one day prior to tumor implantation.

[1019] Tumor Implantation

[1020] NALM6 cells in logarithmic growth phase were harvested and washed in 50 ml falcon tubes at 1200 rpm for 5 minutes, once in growth media and then two times in cold sterile PBS. The cells were resuspended in PBS at a concentration of 5×10⁶ per ml, placed on ice, and immediately injected in mice. Tumor cells were injected intravenously in 200 ul through the caudal vein. The NALM6 model endogenously expresses CD19 and thus, can be used to test the in vivo efficacy of CD19-directed CAR T cells. This model grows well when implanted intravenously in mice and can be imaged for tumor burden measurements.

[1021] Preparation of CART19 and FurON CART19 Cells for the In Vivo Study

[1022] CART cells were generated by starting with blood from healthy apheresed donors whose naïve T cells were obtained by negative selection for T cells, CD4+ and CD8+ lymphocytes. These cells were activated by the addition of CD3/CD28 beads (Dynabeads® Human T-Expander CD3/CD28, Thermo Fisher Scientific) at a ratio of 1:3 (T cell to bead) in T cell medium (RPMI1640, 10% heat-inactivated fetal calf serum (FCS), 2 mM L-glutamine, lx Penicillin/Streptomycin, 100 μM non-essential amino acids, 1 mM Sodium Pyruvate, 10 mM Hepes, and 55 μM 2-mercaptoethanol) at 37° C., 5% CO2. T cells were cultured at 4×10⁶ T cells (UTDs) or 5×10⁶ (CART19 and FurON CART19) in 1 mL medium per well of a 24-well plate. After 24 hours, when T cells were blasting, 0.5 mL of non-concentrated, or smaller volumes of concentrated viral supernatant were added; T cells were transduced at a multiplicity of infection (MOI) of 5. T cells began to divide in a logarithmic growth pattern, which is monitored by measuring the cell counts per mL, and T cells are diluted in fresh medium every two days. On day 7, 100U/ml of IL2 (Peprotech, Rocky Hill, N.J.) and 1 uM bazedoxifene is added to the cultures. On day 9, 1 uM bazedoxifene is added. On day 10 the cells are collected and the percentage of cells transduced (expressing the CD19-specific CAR on the cell surface) was determined by flow cytometry analysis on a FACS Fortessa (BD). The viral transduction shows similar transduction efficiency; the surface expression of the FurON CAR19 (mean fluorescence intensity, MFI) is lower than the observed for CART19. All CAR T cells were produced in research grade (i.e., not clinical grade) manufacturing conditions.

[1023] Treatment with CART19 or FurON CART19 Cells

[1024] CD19+ NALM6 tumor cells expressing luciferase, were infused into NSG mice. Seven days later, the tumor burden was measured by whole body bioluminescence, the animals were randomized into treatment groups (5 mice per group), and infused with PBS (vehicle), CART19 (1×10⁶ or 5×10⁶ CAR+ T cells), FurON CART19 cells (5×10⁶ cells CAR+ T cells), or untransduced T cells (UTD), intravenously via the lateral tail vein. All animals received the same dose of total T cells (16.4×10⁶/mouse). Some treatment groups were dosed with bazedoxifene (BZA), bazedoxifene plus interleukin 2 (BZA/IL2), or vehicle, as indicated by the line. BZA was dosed for 10 days (single dose 200 mg/kg; p.o). IL2 was dosed for 5 days, rested for two, and dosed again for 3 days (single dose 18×10\hat{ }6 IU/kg; i.p.). Tumor growth and animal health were monitored over time. The mean bioluminescence for all treatment groups is plotted in FIG. 27; the arrow indicates when administration of BZA and IL2 was discontinued.

[1025] Results

[1026] As shown in FIG. 47, while the tumor progressed in the negative control mice and mice treated with FurON CART19 only, tumor growth was inhibited in mice infused with CART19, or infused with FurON CART19 and treated with BZA alone or both BZA and IL2. Once dosing of bazedoxifene and IL2 is discontinued, only the constitutively active CART19 at the highest dose was able to control tumor growth. BZA was previously shown to have no effect on the growth of NALM6 tumor cells at the same dose and dose regimen (data unshown). Thus, FurON CART19 in the presence of bazedoxifene shows comparable tumor inhibitory activity as the positive control CART19.

### Example 28: Additional Furon CAR Sequences

TABLE 24
Sequences of additional FurON CAR constructs and components thereof

| | Amino acid sequence | DNA sequence |
|---|---|---|
| Leader sequence/ | MALPVTALLLPLALLLHAARP | atggccctccctgtcaccgccctgctgcttccgctggctcttc |
| Signal peptide (SP) | (SEQ ID NO: 139) | tgctccacgccgctcggccc (SEQ ID NO: 140) |
| SP-Linker 2- | MALPVTALLLPLALLLHAARPS | atggccctccctgtcaccgccctgctgcttccgctggctcttc |
| ERmut1-Furin | LALSLTADQMVSALLDAEPPIL | tgctccacgccgctcggccctcgttggcactttccctgactg |
| cleavage site 2- | YSEYDPTRPFSEASMMGLLT | ccgaccagatggtgtccgcccttctggacgccgagcctcc |
| CD19 CAR2 | NLADRELVHMINWAKRVPGF | aattctgtactcggagtacgatccgactcgcccgttctccga |
| | VDLALHDQVHLLECAWMEILM | agccagcatgatgggcctgttgactaacctggcggaccg |
| | IGLVWRSMEHPGKLLFAPNLL | cgagttggtgcacatgattaactgggctaagcgggtgccg |
| | LDRNQGKCVEGGVEIFDMLLA | ggcttcgtggacctggccctgcacgaccaagtgcacctcc |
| | TSSRFRMMNLQGEEFVCLKSI | tggaatgcgcctggatggaaatcctcatgatcggcctcgtg |
| | ILLNSGVYTFLSSTLKSLEEKD | tggagatccatggagcatcccggaaagctcctgtttgcac |
| | HIHRVLDKITDTLIHLMAKAGLT | ccaacctcctgcttgatcgcaaccagggaaaatgcgtgg |
| | LQQQHQRLAQLLLILSHIRHM | aagggggtgtcgagattttcgacatgctgctcgccacctctt |
| | SSKRMEHLYSMKCKNVVPLS | cccggttccggatgatgaatctgcagggagaagagttcgt |
| | DLLLEMLDAHRLGTGAEDPRP | gtgtctgaagtcaatcatcctgctgaactccggggtctatac |
| | SRKRRSLGDVGEIVMTQSPAT | cttcctgagctcgaccctcaagtcactggaggaaaaaga |
| | LSLSPGERATLSCRASQDISK | ccacatccatcgcgtgctcgataagatcaccgacaccctt |
| | YLNWYQQKPGQAPRLLIYHTS | atccatctcatggcgaaggctggactgaccctgcaacagc |
| | RLHSGIPARFSGSGSGTDYTL | agcaccagaggctggcccagttgctgctgattctgagcca |
| | TISSLQPEDFAVYFCQQGNTL | catccggcacatgtcgtccaagaggatggaacacctgta |
| | PYTFGQGTKLEIKGGGGSGG | cagcatgaagtgcaagaacgtcgtgcctctgtccgatctg |
| | GGSGGGGSQVQLQESGPGL | ctcctggaaatgctggacgcgcacagactcggaaccggc |
| | VKPSETLSLTCTVSGVSLPDY | gcggaagacccccggccctccaggaagcgaaggtccct |
| | GVSWIRQPPGKGLEWIGVIW | cggagacgtgggtgaaattgtgatgacccagtcacccgc |
| | GSETTYYSSSLKSRVTISKDN | cactcttagcctttcacccggtgagcgcgcaaccctgtcttg |
| | SKNQVSLKLSSVTAADTAVYY | cagagcctcccaagacatctcaaaataccttaattggtatc |
| | CAKHYYYGGSYAMDYWGQG | aacagaagcccggacaggctcctcgccttctgatctacca |
| | TLVTVSSTTTPAPRPPTPAPTI | caccagccggctccattctggaatccctgccaggttcagc |
| | ASQPLSLRPEACRPAAGGAV | ggtagcggatctgggaccgactacaccctcactatcagct |
| | HTRGLDFACDIYIWAPLAGTC | cactgcagccagaggacttcgctgtctatttctgtcagcaa |
| | GVLLLSLVITLYCKRGRKKLLYI | gggaacaccctgccctacacctttggacagggcaccaag |
| | FKQPFMRPVQTTQEEDGCSC | ctcgagattaaaggtggaggtggcagcggaggaggtgg |
| | RFPEEEEGGCELRVKFSRSA | gtccggcggtggaggaagccaggtccaactccaagaaa |
| | DAPAYQQGQNQLYNELNLGR | gcggaccgggtcttgtgaagccatcagaaactctttcactg |
| | REEYDVLDKRRGRDPEMGGK | acttgtactgtgagcggagtgtctctccccgattacggggtg |
| | PRRKNPQEGLYNELQKDKMA | tcttggatcagacagccaccggggaagggtctggaatgg |
| | EAYSEIGMKGERRRGKGHDG | attggagtgatttggggctctgagactacttactactcttcatc |
| | LYQGLSTATKDTYDALHMQAL | cctcaagtcacgcgtcaccatctcaaaggacaactctaag |
| | PPR (SEQ ID NO: 990) | aatcaggtgtcactgaaactgtcatctgtgaccgcagccg |
| | | acaccgccgtgtactattgcgctaagcattactattatggcg |
| | | ggagctacgcaatggattactggggacagggtactctggt |
| | | caccgtgtccagcaccactaccccagcaccgaggccac |
| | | ccaccccggctcctaccatcgcctcccagcctctgtccctg |
| | | cgtccggaggcatgtagacccgcagctggtggggccgtg |
| | | catacccggggtcttgacttcgcctgcgatatctacatttgg |
| | | gcccctctggctggtacttgcggggtcctgctgctttcactcg |
| | | tgatcactctttactgtaagcgcggtcggaagaagctgctgt |
| | | acatctttaagcaacccttcatgaggcctgtgcagactactc |
| | | aagaggaggacggctgttcatgccggttcccagaggagg |
| | | aggaaggcggctgcgaactgcgcgtgaaattcagccgc |
| | | agcgcagatgctccagcctaccagcaggggcagaacca |
| | | gctctacaacgaactcaatcttggtcggagagaggagtac |
| | | gacgtgctggacaagcggagaggacgggacccagaaa |
| | | tgggcgggaagccgcgcagaaagaatccccaagaggg |
| | | cctgtacaacgagctccaaaaggataagatggcagaag |
| | | cctatagcgagattggtatgaaaggggaacgcagaaga |
| | | ggcaaaggccacgacggactgtaccagggactcagca |
| | | ccgccaccaaggacacctatgacgctcttcacatgcagg |
| | | ccctgccgcctcgg (SEQ ID NO: 1050) |
| SP-Linker 2- | MALPVTALLLPLALLLHAARPS | atggccctccctgtcaccgccctgctgcttccgctggctcttc |
| ERmut2-Furin | LALSLTADQMVSALLDAEPPIL | tgctccacgccgctcggccctcgttggcactttccctgactg |
| cleavage site 2- | YSEYDPTRPFSEASMMGLLT | ccgaccagatggtgtccgcccttctggacgccgagcctcc |
| CD19 CAR2 | NLADRELVHMINWAKRVPGF | aattctgtactcggagtacgatccgactcgcccgttctccga |
| | VDLTLHDQVHLLECAWMEILM | agccagcatgatgggcctgttgactaacctggcggaccg |
| | IGLVWRSMEHPGKLLFAPNLL | cgagttggtgcacatgattaactgggctaagcgggtgccg |
| | LDRNQGKCVEGGVEIFDMLLA | ggcttcgtggacctgaccctgcacgaccaagtgcacctcc |
| | TSSRFRMMNLQGEEFVCLKSI | tggaatgcgcctggatggaaatcctcatgatcggcctcgtg |
| | ILLNSGVYTFLSSTLKSLEEKD | tggagatccatggagcatcccggaaagctcctgtttgcac |
| | HIHRVLDKITDTLIHLMAKAGLT | ccaacctcctgcttgatcgcaaccagggaaaatgcgtgg |
| | LQQQHQRLAQLLLILSHIRHM | aagggggtgtcgagattttcgacatgctgctcgccacctctt |
| | SNKRMEHLYSMKCKNVVPLS | cccggttccggatgatgaatctgcagggagaagagttcgt |
| | DLLLEMLDAHRLGTGAEDPRP | gtgtctgaagtcaatcatcctgctgaactccggggtctatac |
| | SRKRRSLGDVGEIVMTQSPAT | cttcctgagctcgaccctcaagtcactggaggaaaaaga |
| | LSLSPGERATLSCRASQDISK | ccacatccatcgcgtgctcgataagatcaccgacaccctt |
| | YLNWYQQKPGQAPRLLIYHTS | atccatctcatggcgaaggctggactgaccctgcaacagc |
| | RLHSGIPARFSGSGSGTDYTL | agcaccagaggctggcccagttgctgctgattctgagcca |
| | TISSLQPEDFAVYFCQQGNTL | catccggcacatgtcgaacaagaggatggaacacctgta |
| | PYTFGQGTKLEIKGGGGSGG | cagcatgaagtgcaagaacgtcgtgcctctgtccgatctg |
| | GGSGGGGSQVQLQESGPGL | ctcctggaaatgctggacgcgcacagactcggaaccggc |
| | VKPSETLSLTCTVSGVSLPDY | gcggaagacccccggccctccaggaagcgaaggtccct |
| | GVSWIRQPPGKGLEWIGVIW | cggagacgtgggtgaaattgtgatgacccagtcacccgc |
| | GSETTYYSSSLKSRVTISKDN | cactcttagcctttcacccggtgagcgcgcaaccctgtcttg |
| | SKNQVSLKLSSVTAADTAVYY | cagagcctcccaagacatctcaaaataccttaattggtatc |
| | CAKHYYYGGSYAMDYWGQG | aacagaagcccggacaggctcctcgccttctgatctacca |
| | TLVTVSSTTTPAPRPPTPAPTI | caccagccggctccattctggaatccctgccaggttcagc |
| | ASQPLSLRPEACRPAAGGAV | ggtagcggatctgggaccgactacaccctcactatcagct |
| | HTRGLDFACDIYIWAPLAGTC | cactgcagccagaggacttcgctgtctatttctgtcagcaa |
| | GVLLLSLVITLYCKRGRKKLLYI | gggaacaccctgccctacacctttggacagggcaccaag |
| | FKQPFMRPVQTTQEEDGCSC | ctcgagattaaaggtggaggtggcagcggaggaggtgg |
| | RFPEEEEGGCELRVKFSRSA | gtccggcggtggaggaagccaggtccaactccaagaaa |
| | DAPAYQQGQNQLYNELNLGR | gcggaccgggtcttgtgaagccatcagaaactctttcactg |
| | REEYDVLDKRRGRDPEMGGK | acttgtactgtgagcggagtgtctctccccgattacggggtg |
| | PRRKNPQEGLYNELQKDKMA | tcttggatcagacagccaccggggaagggtctggaatgg |
| | EAYSEIGMKGERRRGKGHDG | attggagtgatttggggctctgagactacttactactcttcatc |
| | LYQGLSTATKDTYDALHMQAL | cctcaagtcacgcgtcaccatctcaaaggacaactctaag |
| | PPR (SEQ ID NO: 991) | aatcaggtgtcactgaaactgtcatctgtgaccgcagccg |
| | | acaccgccgtgtactattgcgctaagcattactattatggcg |
| | | ggagctacgcaatggattactggggacagggtactctggt |
| | | caccgtgtccagcaccactaccccagcaccgaggccac |
| | | ccaccccggctcctaccatcgcctcccagcctctgtccctg |
| | | cgtccggaggcatgtagacccgcagctggtggggccgtg |
| | | catacccggggtcttgacttcgcctgcgatatctacatttgg |
| | | gcccctctggctggtacttgcggggtcctgctgctttcactcg |
| | | tgatcactctttactgtaagcgcggtcggaagaagctgctgt |
| | | acatctttaagcaacccttcatgaggcctgtgcagactactc |
| | | aagaggaggacggctgttcatgccggttcccagaggagg |
| | | aggaaggcggctgcgaactgcgcgtgaaattcagccgc |
| | | agcgcagatgctccagcctaccagcaggggcagaacca |
| | | gctctacaacgaactcaatcttggtcggagagaggagtac |
| | | gacgtgctggacaagcggagaggacgggacccagaaa |
| | | tgggcgggaagccgcgcagaaagaatccccaagaggg |
| | | cctgtacaacgagctccaaaaggataagatggcagaag |
| | | cctatagcgagattggtatgaaaggggaacgcagaaga |
| | | ggcaaaggccacgacggactgtaccagggactcagca |
| | | ccgccaccaaggacacctatgacgctcttcacatgcagg |
| | | ccctgccgcctcgg (SEQ ID NO: 1051) |
| SP-Linker 2- | MALPVTALLLPLALLLHAARPS | atggccctccctgtcaccgccctgctgcttccgctggctcttc |
| ERmut1-Furin | LALSLTADQMVSALLDAEPPIL | tgctccacgccgctcggccctcgttggcactttccctgactg |
| cleavage site 3- | YSEYDPTRPFSEASMMGLLT | ccgaccagatggtgtccgcccttctggacgccgagcctcc |
| CD19 CAR2 | NLADRELVHMINWAKRVPGF | aattctgtactcggagtacgatccgactcgcccgttctccga |
| | VDLALHDQVHLLECAWMEILM | agccagcatgatgggcctgttgactaacctggcggaccg |
| | IGLVWRSMEHPGKLLFAPNLL | cgagttggtgcacatgattaactgggctaagcgggtgccg |
| | LDRNQGKCVEGGVEIFDMLLA | ggcttcgtggacctggccctgcacgaccaagtgcacctcc |
| | TSSRFRMMNLQGEEFVCLKSI | tggaatgcgcctggatggaaatcctcatgatcggcctcgtg |
| | ILLNSGVYTFLSSTLKSLEEKD | tggagatccatggagcatcccggaaagctcctgtttgcac |
| | HIHRVLDKITDTLIHLMAKAGLT | ccaacctcctgcttgatcgcaaccagggaaaatgcgtgg |
| | LQQQHQRLAQLLLILSHIRHM | aagggggtgtcgagattttcgacatgctgctcgccacctctt |
| | SSKRMEHLYSMKCKNVVPLS | cccggttccggatgatgaatctgcagggagaagagttcgt |
| | DLLLEMLDAHRLGTGAEDPRP | gtgtctgaagtcaatcatcctgctgaactccggggtctatac |
| | SRKRREIVMTQSPATLSLSPG | cttcctgagctcgaccctcaagtcactggaggaaaaaga |
| | ERATLSCRASQDISKYLNWYQ | ccacatccatcgcgtgctcgataagatcaccgacaccctt |
| | QKPGQAPRLLIYHTSRLHSGIP | atccatctcatggcgaaggctggactgaccctgcaacagc |
| | ARFSGSGSGTDYTLTISSLQP | agcaccagaggctggcccagttgctgctgattctgagcca |
| | EDFAVYFCQQGNTLPYTFGQ | catccggcacatgtcgtccaagaggatggaacacctgta |
| | GTKLEIKGGGGSGGGGSGGG | cagcatgaagtgcaagaacgtcgtgcctctgtccgatctg |
| | GSQVQLQESGPGLVKPSETL | ctcctggaaatgctggacgcgcacagactcgggacggg |
| | SLTCTVSGVSLPDYGVSWIRQ | agctgaagatccacgacccagcagaaagcgacgggaa |
| | PPGKGLEWIGVIWGSETTYYS | attgtgatgacccagtcacccgccactcttagcctttcaccc |
| | SSLKSRVTISKDNSKNQVSLK | ggtgagcgcgcaaccctgtcttgcagagcctcccaagac |
| | LSSVTAADTAVYYCAKHYYYG | atctcaaaataccttaattggtatcaacagaagcccggac |
| | GSYAMDYWGQGTLVTVSSTT | aggctcctcgccttctgatctaccacaccagccggctccatt |
| | TPAPRPPTPAPTIASQPLSLRP | ctggaatccctgccaggttcagcggtagcggatctgggac |
| | EACRPAAGGAVHTRGLDFAC | cgactacaccctcactatcagctcactgcagccagagga |
| | DIYIWAPLAGTCGVLLLSLVITL | cttcgctgtctatttctgtcagcaagggaacaccctgcccta |
| | YCKRGRKKLLYIFKQPFMRPV | cacctttggacagggcaccaagctcgagattaaaggtgg |
| | QTTQEEDGCSCRFPEEEEGG | aggtggcagcggaggaggtgggtccggcggtggagga |
| | CELRVKFSRSADAPAYQQGQ | agccaggtccaactccaagaaagcggaccgggtcttgtg |
| | NQLYNELNLGRREEYDVLDK | aagccatcagaaactctttcactgacttgtactgtgagcgg |
| | RRGRDPEMGGKPRRKNPQE | agtgtctctccccgattacggggtgtcttggatcagacagc |
| | GLYNELQKDKMAEAYSEIGMK | caccggggaagggtctggaatggattggagtgatttgggg |
| | GERRRGKGHDGLYQGLSTAT | ctctgagactacttactactcttcatccctcaagtcacgcgtc |
| | KDTYDALHMQALPPR | accatctcaaaggacaactctaagaatcaggtgtcactga |
| | (SEQ ID NO: 992) | aactgtcatctgtgaccgcagccgacaccgccgtgtactat |
| | | tgcgctaagcattactattatggcgggagctacgcaatgga |
| | | ttactggggacagggtactctggtcaccgtgtccagcacc |
| | | actaccccagcaccgaggccacccaccccggctcctacc |
| | | atcgcctcccagcctctgtccctgcgtccggaggcatgtag |
| | | acccgcagctggtggggccgtgcatacccggggtcttgac |
| | | ttcgcctgcgatatctacatttgggcccctctggctggtacttg |
| | | cggggtcctgctgctttcactcgtgatcactctttactgtaagc |
| | | gcggtcggaagaagctgctgtacatctttaagcaacccttc |
| | | atgaggcctgtgcagactactcaagaggaggacggctgtt |
| | | catgccggttcccagaggaggaggaaggcggctgcgaa |
| | | ctgcgcgtgaaattcagccgcagcgcagatgctccagcct |
| | | accagcaggggcagaaccagctctacaacgaactcaat |
| | | cttggtcggagagaggagtacgacgtgctggacaagcg |
| | | gagaggacgggacccagaaatgggcgggaagccgcg |
| | | cagaaagaatccccaagagggcctgtacaacgagctcc |
| | | aaaaggataagatggcagaagcctatagcgagattggta |
| | | tgaaaggggaacgcagaagaggcaaaggccacgacg |
| | | gactgtaccagggactcagcaccgccaccaaggacacc |
| | | tatgacgctcttcacatgcaggccctgccgcctcgg |
| | | (SEQ ID NO: 1052) |
| SP-Linker 2- | MALPVTALLLPLALLLHAARPS | atggccctccctgtcaccgccctgctgcttccgctggctcttc |
| ERmut2-Furin | LALSLTADQMVSALLDAEPPIL | tgctccacgccgctcggcccTcgttggcactttccctgactg |
| cleavage site 3- | YSEYDPTRPFSEASMMGLLT | ccgaccagatggtgtccgcccttctggacgccgagcctcc |
| CD19 CAR2 | NLADRELVHMINWAKRVPGF | aattctgtactcggagtacgatccgactcgcccgttctccga |
| | VDLTLHDQVHLLECAWMEILM | agccagcatgatgggcctgttgactaacctggcggaccg |
| | IGLVWRSMEHPGKLLFAPNLL | cgagttggtgcacatgattaactgggctaagcgggtgccg |
| | LDRNQGKCVEGGVEIFDMLLA | ggcttcgtggacctgaccctgcacgaccaagtgcacctcc |
| | TSSRFRMMNLQGEEFVCLKSI | tggaatgcgcctggatggaaatcctcatgatcggcctcgtg |
| | ILLNSGVYTFLSSTLKSLEEKD | tggagatccatggagcatcccggaaagctcctgtttgcac |
| | HIHRVLDKITDTLIHLMAKAGLT | ccaacctcctgcttgatcgcaaccagggaaaatgcgtgg |
| | LQQQHQRLAQLLLILSHIRHM | aagggggtgtcgagattttcgacatgctgctcgccacctctt |
| | SNKRMEHLYSMKCKNVVPLS | cccggttccggatgatgaatctgcagggagaagagttcgt |
| | DLLLEMLDAHRLGTGAEDPRP | gtgtctgaagtcaatcatcctgctgaactccggggtctatac |
| | SRKRREIVMTQSPATLSLSPG | cttcctgagctcgaccctcaagtcactggaggaaaaaga |
| | ERATLSCRASQDISKYLNWYQ | ccacatccatcgcgtgctcgataagatcaccgacaccctt |
| | QKPGQAPRLLIYHTSRLHSGIP | atccatctcatggcgaaggctggactgaccctgcaacagc |
| | ARFSGSGSGTDYTLTISSLQP | agcaccagaggctggcccagttgctgctgattctgagcca |
| | EDFAVYFCQQGNTLPYTFGQ | catccggcacatgtcgaacaagaggatggaacacctgta |
| | GTKLEIKGGGGSGGGGSGGG | cagcatgaagtgcaagaacgtcgtgcctctgtccgatctg |
| | GSQVQLQESGPGLVKPSETL | ctcctggaaatgctggacgcgcacagactcGggacggg |
| | SLTCTVSGVSLPDYGVSWIRQ | agctgaagatccacgacccagcagaaagcgacgggaa |
| | PPGKGLEWIGVIWGSETTYYS | attgtgatgacccagtcacccgccactcttagcctttcaccc |
| | SSLKSRVTISKDNSKNQVSLK | ggtgagcgcgcaaccctgtcttgcagagcctcccaagac |
| | LSSVTAADTAVYYCAKHYYYG | atctcaaaataccttaattggtatcaacagaagcccggac |
| | GSYAMDYWGQGTLVTVSSTT | aggctcctcgccttctgatctaccacaccagccggctccatt |
| | TPAPRPPTPAPTIASQPLSLRP | ctggaatccctgccaggttcagcggtagcggatctgggac |
| | EACRPAAGGAVHTRGLDFAC | cgactacaccctcactatcagctcactgcagccagagga |
| | DIYIWAPLAGTCGVLLLSLVITL | cttcgctgtctatttctgtcagcaagggaacaccctgcccta |
| | YCKRGRKKLLYIFKQPFMRPV | cacctttggacagggcaccaagctcgagattaaaggtgg |
| | QTTQEEDGCSCRFPEEEEGG | aggtggcagcggaggaggtgggtccggcggtggagga |
| | CELRVKFSRSADAPAYQQGQ | agccaggtccaactccaagaaagcggaccgggtcttgtg |
| | NQLYNELNLGRREEYDVLDK | aagccatcagaaactctttcactgacttgtactgtgagcgg |
| | RRGRDPEMGGKPRRKNPQE | agtgtctctccccgattacggggtgtcttggatcagacagc |
| | GLYNELQKDKMAEAYSEIGMK | caccggggaagggtctggaatggattggagtgatttgggg |
| | GERRRGKGHDGLYQGLSTAT | ctctgagactacttactactcttcatccctcaagtcacgcgtc |
| | KDTYDALHMQALPPR | accatctcaaaggacaactctaagaatcaggtgtcactga |
| | (SEQ ID NO: 993) | aactgtcatctgtgaccgcagccgacaccgccgtgtactat |
| | | tgcgctaagcattactattatggcgggagctacgcaatgga |
| | | ttactggggacagggtactctggtcaccgtgtccagcacc |
| | | actaccccagcaccgaggccacccaccccggctcctacc |
| | | atcgcctcccagcctctgtccctgcgtccggaggcatgtag |
| | | acccgcagctggtggggccgtgcatacccggggtcttgac |
| | | ttcgcctgcgatatctacatttgggcccctctggctggtacttg |
| | | cggggtcctgctgctttcactcgtgatcactctttactgtaagc |
| | | gcggtcggaagaagctgctgtacatctttaagcaacccttc |
| | | atgaggcctgtgcagactactcaagaggaggacggctgtt |
| | | catgccggttcccagaggaggaggaaggcggctgcgaa |
| | | ctgcgcgtgaaattcagccgcagcgcagatgctccagcct |
| | | accagcaggggcagaaccagctctacaacgaactcaat |
| | | cttggtcggagagaggagtacgacgtgctggacaagcg |
| | | gagaggacgggacccagaaatgggcgggaagccgcg |
| | | cagaaagaatccccaagagggcctgtacaacgagctcc |
| | | aaaaggataagatggcagaagcctatagcgagattggta |
| | | tgaaaggggaacgcagaagaggcaaaggccacgacg |
| | | gactgtaccagggactcagcaccgccaccaaggacacc |
| | | tatgacgctcttcacatgcaggccctgccgcctcgg |
| | | (SEQ ID NO: 1053) |
| SP-Linker 2- | MALPVTALLLPLALLLHAARPS | atggccctccctgtcaccgccctgctgcttccgctggctcttc |
| ERmut1-Furin | LALSLTADQMVSALLDAEPPIL | tgctccacgccgctcggccctcgttggcactttccctgactg |
| cleavage site 2- | YSEYDPTRPFSEASMMGLLT | ccgaccagatggtgtccgcccttctggacgccgagcctcc |
| CD123 CAR | NLADRELVHMINWAKRVPGF | aattctgtactcggagtacgatccgactcgcccgttctccga |
| | VDLALHDQVHLLECAWMEILM | agccagcatgatgggcctgttgactaacctggcggaccg |
| | IGLVWRSMEHPGKLLFAPNLL | cgagttggtgcacatgattaactgggctaagcgggtgccg |
| | LDRNQGKCVEGGVEIFDMLLA | ggcttcgtggacctggccctgcacgaccaagtgcacctcc |
| | TSSRFRMMNLQGEEFVCLKSI | tggaatgcgcctggatggaaatcctcatgatcggcctcgtg |
| | ILLNSGVYTFLSSTLKSLEEKD | tggagatccatggagcatcccggaaagctcctgtttgcac |
| | HIHRVLDKITDTLIHLMAKAGLT | ccaacctcctgcttgatcgcaaccagggaaaatgcgtgg |
| | LQQQHQRLAQLLLILSHIRHM | aagggggtgtcgagattttcgacatgctgctcgccacctctt |
| | SSKRMEHLYSMKCKNVVPLS | cccggttccggatgatgaatctgcagggagaagagttcgt |
| | DLLLEMLDAHRLGTGAEDPRP | gtgtctgaagtcaatcatcctgctgaactccggggtctatac |
| | SRKRRSLGDVGQVQLVQSGA | cttcctgagctcgaccctcaagtcactggaggaaaaaga |
| | EVKKPGASVKVSCKASGYTFT | ccacatccatcgcgtgctcgataagatcaccgacaccctt |
| | GYYMHWVRQAPGQGLEWM | atccatctcatggcgaaggctggactgaccctgcaacagc |
| | GWINPNSGGTNYAQKFQGRV | agcaccagaggctggcccagttgctgctgattctgagcca |
| | TLTRDTSISTVYMELSRLRSD | catccggcacatgtcgtccaagaggatggaacacctgta |
| | DTAVYYCARDMNILATVPFDI | cagcatgaagtgcaagaacgtcgtgcctctgtccgatctg |
| | WGQGTMVTVSSGGGGSGGG | ctcctggaaatgctggacgcgcacagactcggaaccggc |
| | GSGGGGSDIQMTQSPSSLSA | gcggaagacccccggccctccaggaagcgaaggtccct |
| | SVGDRVTITCRASQSISSYLN | cggagacgtgggtcaagtgcaactcgtccaaagcggag |
| | WYQQKPGKAPKLLIYAASSLQ | cggaagtcaagaaacccggagcgagcgtgaaagtgtcc |
| | SGVPSRFSGSGSGTDFTLTV | tgcaaagcctccggctacacctttacgggctactacatgca |
| | NSLQPEDFATYYCQQGDSVP | ctgggtgcgccaggcaccaggacagggtcttgaatggat |
| | LTFGGGTRLEIKTTTPAPRPPT | gggatggatcaaccctaattcgggcggaactaactacgc |
| | PAPTIASQPLSLRPEACRPAA | acagaagttccaggggagagtgactctgactcgggatac |
| | GGAVHTRGLDFACDIYIWAPL | ctccatctcaactgtctacatggaactctcccgcttgcggtc |
| | AGTCGVLLLSLVITLYCKRGRK | agatgatacggcagtgtactactgcgcccgcgacatgaat |
| | KLLYIFKQPFMRPVQTTQEED | atcctggctaccgtgccgttcgacatctggggacagggga |
| | GCSCRFPEEEEGGCELRVKF | ctatggttactgtctcatcgggcggtggaggttcaggagga |
| | SRSADAPAYQQGQNQLYNEL | ggcggctcgggaggcggaggttcggacattcagatgacc |
| | NLGRREEYDVLDKRRGRDPE | cagtccccatcctctctgtcggccagcgtcggagatagggt |
| | MGGKPRRKNPQEGLYNELQK | gaccattacctgtcgggcctcgcaaagcatctcctcgtacc |
| | DKMAEAYSEIGMKGERRRGK | tcaactggtatcagcaaaagccgggaaaggcgcctaag |
| | GHDGLYQGLSTATKDTYDAL | ctgctgatctacgccgcttcgagcttgcaaagcggggtgcc |
| | HMQALPPR (SEQ ID | atccagattctcgggatcaggctcaggaaccgacttcacc |
| | NO: 994) | ctgaccgtgaacagcctccagccggaggactttgccactt |
| | | actactgccagcagggagactccgtgccgcttactttcggg |
| | | gggggtacccgcctggagatcaagaccactaccccagc |
| | | accgaggccacccaccccggctcctaccatcgcctccca |
| | | gcctctgtccctgcgtccggaggcatgtagacccgcagct |
| | | ggtggggccgtgcatacccggggtcttgacttcgcctgcg |
| | | atatctacatttgggcccctctggctggtacttgcggggtcct |
| | | gctgctttcactcgtgatcactctttactgtaagcgcggtcgg |
| | | aagaagctgctgtacatctttaagcaacccttcatgaggcc |
| | | tgtgcagactactcaagaggaggacggctgttcatgccgg |
| | | ttcccagaggaggaggaaggcggctgcgaactgcgcgt |
| | | gaaattcagccgcagcgcagatgctccagcctaccagca |
| | | ggggcagaaccagctctacaacgaactcaatcttggtcg |
| | | gagagaggagtacgacgtgctggacaagcggagagga |
| | | cgggacccagaaatgggcgggaagccgcgcagaaag |
| | | aatccccaagagggcctgtacaacgagctccaaaagga |
| | | taagatggcagaagcctatagcgagattggtatgaaagg |
| | | ggaacgcagaagaggcaaaggccacgacggactgtac |
| | | cagggactcagcaccgccaccaaggacacctatgacgc |
| | | tcttcacatgcaggccctgccgcctcgg (SEQ ID NO: 1054) |
| SP-Linker 2- | MALPVTALLLPLALLLHAARPS | atggccctccctgtcaccgccctgctgcttccgctggctcttc |
| ERmut2-Furin | LALSLTADQMVSALLDAEPPIL | tgctccacgccgctcggcccTcgttggcactttccctgactg |
| cleavage site 2- | YSEYDPTRPFSEASMMGLLT | ccgaccagatggtgtccgcccttctggacgccgagcctcc |
| CD123 CAR | NLADRELVHMINWAKRVPGF | aattctgtactcggagtacgatccgactcgcccgttctccga |
| | VDLTLHDQVHLLECAWMEILM | agccagcatgatgggcctgttgactaacctggcggaccg |
| | IGLVWRSMEHPGKLLFAPNLL | cgagttggtgcacatgattaactgggctaagcgggtgccg |
| | LDRNQGKCVEGGVEIFDMLLA | ggcttcgtggacctgaccctgcacgaccaagtgcacctcc |
| | TSSRFRMMNLQGEEFVCLKSI | tggaatgcgcctggatggaaatcctcatgatcggcctcgtg |
| | ILLNSGVYTFLSSTLKSLEEKD | tggagatccatggagcatcccggaaagctcctgtttgcac |
| | HIHRVLDKITDTLIHLMAKAGLT | ccaacctcctgcttgatcgcaaccagggaaaatgcgtgg |
| | LQQQHQRLAQLLLILSHIRHM | aagggggtgtcgagattttcgacatgctgctcgccacctctt |
| | SNKRMEHLYSMKCKNVVPLS | cccggttccggatgatgaatctgcagggagaagagttcgt |
| | DLLLEMLDAHRLGTGAEDPRP | gtgtctgaagtcaatcatcctgctgaactccggggtctatac |
| | SRKRRSLGDVGQVQLVQSGA | cttcctgagctcgaccctcaagtcactggaggaaaaaga |
| | EVKKPGASVKVSCKASGYTFT | ccacatccatcgcgtgctcgataagatcaccgacaccctt |
| | GYYMHWVRQAPGQGLEWM | atccatctcatggcgaaggctggactgaccctgcaacagc |
| | GWINPNSGGTNYAQKFQGRV | agcaccagaggctggcccagttgctgctgattctgagcca |
| | TLTRDTSISTVYMELSRLRSD | catccggcacatgtcgaacaagaggatggaacacctgta |
| | DTAVYYCARDMNILATVPFDI | cagcatgaagtgcaagaacgtcgtgcctctgtccgatctg |
| | WGQGTMVTVSSGGGGSGGG | ctcctggaaatgctggacgcgcacagactcggaaccggc |
| | GSGGGGSDIQMTQSPSSLSA | gcggaagacccccggccctccaggaagcgaaggtccct |
| | SVGDRVTITCRASQSISSYLN | cggagacgtgggtcaagtgcaactcgtccaaagcggag |
| | WYQQKPGKAPKLLIYAASSLQ | cggaagtcaagaaacccggagcgagcgtgaaagtgtcc |
| | SGVPSRFSGSGSGTDFTLTV | tgcaaagcctccggctacacctttacgggctactacatgca |
| | NSLQPEDFATYYCQQGDSVP | ctgggtgcgccaggcaccaggacagggtcttgaatggat |
| | LTFGGGTRLEIKTTTPAPRPPT | gggatggatcaaccctaattcgggcggaactaactacgc |
| | PAPTIASQPLSLRPEACRPAA | acagaagttccaggggagagtgactctgactcgggatac |
| | GGAVHTRGLDFACDIYIWAPL | ctccatctcaactgtctacatggaactctcccgcttgcggtc |
| | AGTCGVLLLSLVITLYCKRGRK | agatgatacggcagtgtactactgcgcccgcgacatgaat |
| | KLLYIFKQPFMRPVQTTQEED | atcctggctaccgtgccgttcgacatctggggacagggga |
| | GCSCRFPEEEEGGCELRVKF | ctatggttactgtctcatcgggcggtggaggttcaggagga |
| | SRSADAPAYQQGQNQLYNEL | ggcggctcgggaggcggaggttcggacattcagatgacc |
| | NLGRREEYDVLDKRRGRDPE | cagtccccatcctctctgtcggccagcgtcggagatagggt |
| | MGGKPRRKNPQEGLYNELQK | gaccattacctgtcgggcctcgcaaagcatctcctcgtacc |
| | DKMAEAYSEIGMKGERRRGK | tcaactggtatcagcaaaagccgggaaaggcgcctaag |
| | GHDGLYQGLSTATKDTYDAL | ctgctgatctacgccgcttcgagcttgcaaagcggggtgcc |
| | HMQALPPR (SEQ ID | atccagattctcgggatcaggctcaggaaccgacttcacc |
| | NO: 995) | ctgaccgtgaacagcctccagccggaggactttgccactt |
| | | actactgccagcagggagactccgtgccgcttactttcggg |
| | | gggggtacccgcctggagatcaagaccactaccccagc |
| | | accgaggccacccaccccggctcctaccatcgcctccca |
| | | gcctctgtccctgcgtccggaggcatgtagacccgcagct |
| | | ggtggggccgtgcatacccggggtcttgacttcgcctgcg |
| | | atatctacatttgggcccctctggctggtacttgcggggtcct |
| | | gctgctttcactcgtgatcactctttactgtaagcgcggtcgg |
| | | aagaagctgctgtacatctttaagcaacccttcatgaggcc |
| | | tgtgcagactactcaagaggaggacggctgttcatgccgg |
| | | ttcccagaggaggaggaaggcggctgcgaactgcgcgt |
| | | gaaattcagccgcagcgcagatgctccagcctaccagca |
| | | ggggcagaaccagctctacaacgaactcaatcttggtcg |
| | | gagagaggagtacgacgtgctggacaagcggagagga |
| | | cgggacccagaaatgggcgggaagccgcgcagaaag |
| | | aatccccaagagggcctgtacaacgagctccaaaagga |
| | | taagatggcagaagcctatagcgagattggtatgaaagg |
| | | ggaacgcagaagaggcaaaggccacgacggactgtac |
| | | cagggactcagcaccgccaccaaggacacctatgacgc |
| | | tcttcacatgcaggccctgccgcctcgg (SEQ ID NO: 1055) |
| SP-Linker 2- | MALPVTALLLPLALLLHAARPS | atggccctccctgtcaccgccctgctgcttccgctggctcttc |
| ERmut1-Furin | LALSLTADQMVSALLDAEPPIL | tgctccacgccgctcggccctcgttggcactttccctgactg |
| cleavage site 3- | YSEYDPTRPFSEASMMGLLT | ccgaccagatggtgtccgcccttctggacgccgagcctcca |
| CD123 CAR | NLADRELVHMINWAKRVPGF | attctgtactcggagtacgatccgactcgcccgttctccgaa |
| | VDLALHDQVHLLECAWMEILM | gccagcatgatgggcctgttgactaacctggcggaccgcg |
| | IGLVWRSMEHPGKLLFAPNLL | agttggtgcacatgattaactgggctaagcgggtgccgggc |
| | LDRNQGKCVEGGVEIFDMLLA | ttcgtggacctggccctgcacgaccaagtgcacctcctgga |
| | TSSRFRMMNLQGEEFVCLKSI | atgcgcctggatggaaatcctcatgatcggcctcgtgtgga |
| | ILLNSGVYTFLSSTLKSLEEKD | gatccatggagcatcccggaaagctcctgtttgcacccaac |
| | HIHRVLDKITDTLIHLMAKAGLT | ctcctgcttgatcgcaaccagggaaaatgcgtggaagggg |
| | LQQQHQRLAQLLLILSHIRHM | gtgtcgagattttcgacatgctgctcgccacctcttcccggtt |
| | SSKRMEHLYSMKCKNVVPLS | ccggatgatgaatctgcagggagaagagttcgtgtgtctga |
| | DLLLEMLDAHRLGTGAEDPRP | agtcaatcatcctgctgaactccggggtctataccttcctga |
| | SRKRRQVQLVQSGAEVKKPG | gctcgaccctcaagtcactggaggaaaaagaccacatcca |
| | ASVKVSCKASGYTFTGYYMH | tcgcgtgctcgataagatcaccgacacccttatccatctcat |
| | WVRQAPGQGLEWMGWINPN | ggcgaaggctggactgaccctgcaacagcagcaccagag |
| | SGGTNYAQKFQGRVTLTRDT | gctggcccagttgctgctgattctgagccacatccggcacat |
| | SISTVYMELSRLRSDDTAVYY | gtcgtccaagaggatggaacacctgtacagcatgaagtgc |
| | CARDMNILATVPFDIWGQGTM | aagaacgtcgtgcctctgtccgatctgctcctggaaatgctg |
| | VTVSSGGGGSGGGGSGGGG | gacgcgcacagactcggaaccggcgcggaagacccccgg |
| | SDIQMTQSPSSLSASVGDRVT | ccctccaggaagcgaaggcaagtgcaactcgtccaaagcg |
| | ITCRASQSISSYLNWYQQKPG | gagcggaagtcaagaaacccggagcgagcgtgaaagtgt |
| | KAPKLLIYAASSLQSGVPSRFS | cctgcaaagcctccggctacacctttacgggctactacatg |
| | GSGSGTDFTLTVNSLQPEDFA | cactgggtgcgccaggcaccaggacagggtcttgaatgga |
| | TYYCQQGDSVPLTFGGGTRL | tgggatggatcaaccctaattcgggcggaactaactacgca |
| | EIKTTTPAPRPPTPAPTIASQP | cagaagttccaggggagagtgactctgactcgggatacctc |
| | LSLRPEACRPAAGGAVHTR | catctcaactgtctacatggaactctcccgcttgcggtcaga |
| | GLDFACDIYIWAPLAGTCG | tgatacggcagtgtactactgcgcccgcgacatgaatatcc |
| | VLLLSLVITLYCKRGRKKLL | tggctaccgtgccgttcgacatctggggacaggggactatg |
| | YIFKQPFMRPVQTTQEEDG | gttactgtctcatcgggcggtggaggttcaggaggaggcgg |
| | CSCRFPEEEEGGCELRVK | ctcgggaggcggaggttcggacattcagatgacccagtcc |
| | FSRSADAPAYQQGQNQLY | ccatcctctctgtcggccagcgtcggagatagggtgaccat |
| | NELNLGRREEYDVLDKRR | tacctgtcgggcctcgcaaagcatctcctcgtacctcaactg |
| | GRDPEMGGKPRRKNPQE | gtatcagcaaaagccgggaaaggcgcctaagctgctgatc |
| | GLYNELQKDKMAEAYSEIG | tacgccgcttcgagcttgcaaagcggggtgccatccagatt |
| | MKGERRRGKGHDGLYQGL | ctcgggatcaggctcaggaaccgacttcaccctgaccgtga |
| | STATKDTYDALHMQALPPR | acagcctccagccggaggactttgccacttactactgccag |
| | (SEQ ID NO: 996) | cagggagactccgtgccgcttactttcggggggggtacccg |
| | | cctggagatcaagaccactaccccagcaccgaggccaccc |
| | | accccggctcctaccatcgcctcccagcctctgtccctgcgt |
| | | ccggaggcatgtagacccgcagctggtggggccgtgcata |
| | | cccggggtcttgacttcgcctgcgatatctacatttgggccc |
| | | ctctggctggtacttgcggggtcctgctgctttcactcgtgat |
| | | cactctttactgtaagcgcggtcggaagaagctgctgtaca |
| | | tctttaagcaacccttcatgaggcctgtgcagactactcaag |
| | | aggaggacggctgttcatgccggttcccagaggaggagga |
| | | aggcggctgcgaactgcgcgtgaaattcagccgcagcgca |
| | | gatgctccagcctaccagcaggggcagaaccagctctaca |
| | | acgaactcaatcttggtcggagagaggagtacgacgtgct |
| | | ggacaagcggagaggacgggacccagaaatgggcggga |
| | | agccgcgcagaaagaatccccaagagggcctgtacaacg |
| | | agctccaaaaggataagatggcagaagcctatagcgagat |
| | | tggtatgaaaggggaacgcagaagaggcaaaggccacga |
| | | cggactgtaccagggactcagcaccgccaccaaggacacc |
| | | tatgacgctcttcacatgcaggccctgccgcctcgg (SEQ ID |
| | | NO: 1056) |
| SP-Linker 2- | MALPVTALLLPLALLLHAARPS | atggccctccctgtcaccgccctgctgcttccgctggctcttc |
| ERmut2-Furin | LALSLTADQMVSALLDAEPPIL | tgctccacgccgctcggcccTcgttggcactttccctgactg |
| cleavage site 3- | YSEYDPTRPFSEASMMGLLT | ccgaccagatggtgtccgcccttctggacgccgagcctcc |
| CD123 CAR | NLADRELVHMINWAKRVPGF | aattctgtactcggagtacgatccgactcgcccgttctccga |
| | VDLTLHDQVHLLECAWMEILM | agccagcatgatgggcctgttgactaacctggcggaccg |
| | IGLVWRSMEHPGKLLFAPNLL | cgagttggtgcacatgattaactgggctaagcgggtgccg |
| | LDRNQGKCVEGGVEIFDMLLA | ggcttcgtggacctgaccctgcacgaccaagtgcacctcc |
| | TSSRFRMMNLQGEEFVCLKSI | tggaatgcgcctggatggaaatcctcatgatcggcctcgtg |
| | ILLNSGVYTFLSSTLKSLEEKD | tggagatccatggagcatcccggaaagctcctgtttgcac |
| | HIHRVLDKITDTLIHLMAKAGLT | ccaacctcctgcttgatcgcaaccagggaaaatgcgtgg |
| | LQQQHQRLAQLLLILSHIRHM | aagggggtgtcgagattttcgacatgctgctcgccacctctt |
| | SNKRMEHLYSMKCKNVVPLS | cccggttccggatgatgaatctgcagggagaagagttcgt |
| | DLLLEMLDAHRLGTGAEDPRP | gtgtctgaagtcaatcatcctgctgaactccggggtctatac |
| | SRKRRQVQLVQSGAEVKKPG | cttcctgagctcgaccctcaagtcactggaggaaaaaga |
| | ASVKVSCKASGYTFTGYYMH | ccacatccatcgcgtgctcgataagatcaccgacaccctt |
| | WVRQAPGQGLEWMGWINPN | atccatctcatggcgaaggctggactgaccctgcaacagc |
| | SGGTNYAQKFQGRVTLTRDT | agcaccagaggctggcccagttgctgctgattctgagcca |
| | SISTVYMELSRLRSDDTAVYY | catccggcacatgtcgaacaagaggatggaacacctgta |
| | CARDMNILATVPFDIWGQGTM | cagcatgaagtgcaagaacgtcgtgcctctgtccgatctg |
| | VTVSSGGGGSGGGGSGGGG | ctcctggaaatgctggacgcgcacagactcgggacggg |
| | SDIQMTQSPSSLSASVGDRVT | agctgaagatccacgacccagcagaaagcgacggcaa |
| | ITCRASQSISSYLNWYQQKPG | gtgcaactcgtccaaagcggagcggaagtcaagaaacc |
| | KAPKLLIYAASSLQSGVPSRFS | cggagcgagcgtgaaagtgtcctgcaaagcctccggcta |
| | GSGSGTDFTLTVNSLQPEDFA | cacctttacgggctactacatgcactgggtgcgccaggca |
| | TYYCQQGDSVPLTFGGGTRL | ccaggacagggtcttgaatggatgggatggatcaacccta |
| | EIKTTTPAPRPPTPAPTIASQP | attcgggcggaactaactacgcacagaagttccagggga |
| | LSLRPEACRPAAGGAVHTRG | gagtgactctgactcgggatacctccatctcaactgtctaca |
| | LDFACDIYIWAPLAGTCGVLLL | tggaactctcccgcttgcggtcagatgatacggcagtgtac |
| | SLVITLYCKRGRKKLLYIFKQP | tactgcgcccgcgacatgaatatcctggctaccgtgccgtt |
| | FMRPVQTTQEEDGCSCRFPE | cgacatctggggacaggggactatggttactgtctcatcgg |
| | EEEGGCELRVKFSRSADAPA | gcggtggaggttcaggaggaggcggctcgggaggcgg |
| | YQQGQNQLYNELNLGRREEY | aggttcggacattcagatgacccagtccccatcctctctgtc |
| | DVLDKRRGRDPEMGGKPRRK | ggccagcgtcggagatagggtgaccattacctgtcgggc |
| | NPQEGLYNELQKDKMAEAYS | ctcgcaaagcatctcctcgtacctcaactggtatcagcaaa |
| | EIGMKGERRRGKGHDGLYQG | agccgggaaaggcgcctaagctgctgatctacgccgcttc |
| | LSTATKDTYDALHMQALPPR | gagcttgcaaagcggggtgccatccagattctcgggatca |
| | (SEQ ID NO: 997) | ggctcaggaaccgacttcaccctgaccgtgaacagcctc |
| | | cagccggaggactttgccacttactactgccagcaggga |
| | | gactccgtgccgcttactttcggggggggtacccgcctgga |
| | | gatcaagaccactaccccagcaccgaggccacccaccc |
| | | cggctcctaccatcgcctcccagcctctgtccctgcgtccg |
| | | gaggcatgtagacccgcagctggtggggccgtgcatacc |
| | | cggggtcttgacttcgcctgcgatatctacatttgggcccctc |
| | | tggctggtacttgcggggtcctgctgctttcactcgtgatcac |
| | | tctttactgtaagcgcggtcggaagaagctgctgtacatcttt |
| | | aagcaacccttcatgaggcctgtgcagactactcaagag |
| | | gaggacggctgttcatgccggttcccagaggaggaggaa |
| | | ggcggctgcgaactgcgcgtgaaattcagccgcagcgc |
| | | agatgctccagcctaccagcaggggcagaaccagctcta |
| | | caacgaactcaatcttggtcggagagaggagtacgacgt |
| | | gctggacaagcggagaggacgggacccagaaatgggc |
| | | gggaagccgcgcagaaagaatccccaagagggcctgt |
| | | acaacgagctccaaaaggataagatggcagaagcctat |
| | | agcgagattggtatgaaaggggaacgcagaagaggca |
| | | aaggccacgacggactgtaccagggactcagcaccgcc |
| | | accaaggacacctatgacgctcttcacatgcaggccctgc |
| | | cgcctcgg (SEQ ID NO: 1057) |
| SP-Linker 2- | MALPVTALLLPLALLLHAARPS | atggccctccctgtcaccgccctgctgcttccgctggctcttc |
| ERmut1-Furin | LALSLTADQMVSALLDAEPPIL | tgctccacgccgctcggcccTcgttggcactttccctgactg |
| cleavage site 2- | YSEYDPTRPFSEASMMGLLT | ccgaccagatggtgtccgcccttctggacgccgagcctcc |
| BCMA CAR | NLADRELVHMINWAKRVPGF | aattctgtactcggagtacgatccgactcgcccgttctccga |
| | VDLALHDQVHLLECAWMEILM | agccagcatgatgggcctgttgactaacctggcggaccg |
| | IGLVWRSMEHPGKLLFAPNLL | cgagttggtgcacatgattaactgggctaagcgggtgccg |
| | LDRNQGKCVEGGVEIFDMLLA | ggcttcgtggacctggccctgcacgaccaagtgcacctcc |
| | TSSRFRMMNLOGEEFVCLKSI | tggaatgcgcctggatggaaatcctcatgatcggcctcgtg |
| | ILLNSGVYTFLSSTLKSLEEKD | tggagatccatggagcatcccggaaagctcctgtttgcac |
| | HIHRVLDKITDTLIHLMAKAGLT | ccaacctcctgcttgatcgcaaccagggaaaatgcgtgg |
| | LQQQHQRLAQLLLILSHIRHM | aagggggtgtcgagattttcgacatgctgctcgccacctctt |
| | SSKRMEHLYSMKCKNVVPLS | cccggttccggatgatgaatctgcagggagaagagttcgt |
| | DLLLEMLDAHRLGTGAEDPRP | gtgtctgaagtcaatcatcctgctgaactccggggtctatac |
| | SRKRRSLGDVGEVQLVESGG | cttcctgagctcgaccctcaagtcactggaggaaaaaga |
| | GLVQPGGSLRLSCAVSGFALS | ccacatccatcgcgtgctcgataagatcaccgacaccctt |
| | NHGMSWVRRAPGKGLEWVS | atccatctcatggcgaaggctggactgaccctgcaacagc |
| | GIVYSGSTYYAASVKGRFTISR | agcaccagaggctggcccagttgctgctgattctgagcca |
| | DNSRNTLYLQMNSLRPEDTAI | catccggcacatgtcgtccaagaggatggaacacctgta |
| | YYCSAHGGESDVWGQGTTVT | cagcatgaagtgcaagaacgtcgtgcctctgtccgatctg |
| | VSSASGGGGSGGRASGGGG | ctcctggaaatgctggacgcgcacagactcggaaccggc |
| | SDIQLTQSPSSLSASVGDRVTI | gcggaagacccccggccctccaggaagcgaaggtccct |
| | TCRASQSISSYLNWYQQKPG | cggagacgtgggtgaagtgcaattggtggaatcaggggg |
| | KAPKLLIYAASSLQSGVPSRFS | aggacttgtgcagcctggaggatcgctgagactgtcatgtg |
| | GSGSGTDFTLTISSLQPEDFA | ccgtgtccggctttgccctgtccaaccacgggatgtcctgg |
| | TYYCQQSYSTPYTFGQGTKV | gtccgccgcgcgcctggaaagggcctcgaatgggtgtcg |
| | EIKTTTPAPRPPTPAPTIASQP | ggtattgtgtacagcggtagcacctactatgccgcatccgt |
| | LSLRPEACRPAAGGAVHTRG | gaaggggagattcaccatcagccgggacaactccagga |
| | LDFACDIYIWAPLAGTCGVLLL | acactctgtacctccaaatgaattcgctgaggccagagga |
| | SLVITLYCKRGRKKLLYIFKQP | cactgccatctactactgctccgcgcatggcggagagtcc |
| | FMRPVQTTQEEDGCSCRFPE | gacgtctggggacaggggaccaccgtgaccgtgtctagc |
| | EEEGGCELRVKFSRSADAPA | gcgtccggcggaggcggcagcgggggtcgggcatcag |
| | YQQGQNQLYNELNLGRREEY | ggggcggcggatcggacatccagctcacccagtccccg |
| | DVLDKRRGRDPEMGGKPRRK | agctcgctgtccgcctccgtgggagatcgggtcaccatca |
| | NPQEGLYNELQKDKMAEAYS | cgtgccgcgccagccagtcgatttcctcctacctgaactgg |
| | EIGMKGERRRGKGHDGLYQG | taccaacagaagcccggaaaagccccgaagcttctcatc |
| | LSTATKDTYDALHMQALPPR | tacgccgcctcgagcctgcagtcaggagtgccctcacggt |
| | (SEQ ID NO: 998) | tctccggctccggttccggtactgatttcaccctgaccatttcc |
| | | tccctgcaaccggaggacttcgctacttactactgccagca |
| | | gtcgtactccaccccctacactttcggacaaggcaccaag |
| | | gtcgaaatcaagaccactaccccagcaccgaggccacc |
| | | caccccggctcctaccatcgcctcccagcctctgtccctgc |
| | | gtccggaggcatgtagacccgcagctggtggggccgtgc |
| | | atacccggggtcttgacttcgcctgcgatatctacatttggg |
| | | cccctctggctggtacttgcggggtcctgctgctttcactcgt |
| | | gatcactctttactgtaagcgcggtcggaagaagctgctgt |
| | | acatctttaagcaacccttcatgaggcctgtgcagactactc |
| | | aagaggaggacggctgttcatgccggttcccagaggagg |
| | | aggaaggcggctgcgaactgcgcgtgaaattcagccgc |
| | | agcgcagatgctccagcctaccagcaggggcagaacca |
| | | gctctacaacgaactcaatcttggtcggagagaggagtac |
| | | gacgtgctggacaagcggagaggacgggacccagaaa |
| | | tgggcgggaagccgcgcagaaagaatccccaagaggg |
| | | cctgtacaacgagctccaaaaggataagatggcagaag |
| | | cctatagcgagattggtatgaaaggggaacgcagaaga |
| | | ggcaaaggccacgacggactgtaccagggactcagca |
| | | ccgccaccaaggacacctatgacgctcttcacatgcagg |
| | | ccctgccgcctcgg (SEQ ID NO: 1058) |
| SP-Linker 2- | MALPVTALLLPLALLLHAARPS | atggccctccctgtcaccgccctgctgcttccgctggctcttc |
| ERmut2-Furin | LALSLTADQMVSALLDAEPPIL | tgctccacgccgctcggcccTcgttggcactttccctgactg |
| cleavage site 2- | YSEYDPTRPFSEASMMGLLT | ccgaccagatggtgtccgcccttctggacgccgagcctcc |
| BCMA CAR | NLADRELVHMINWAKRVPGF | aattctgtactcggagtacgatccgactcgcccgttctccga |
| | VDLTLHDQVHLLECAWMEILM | agccagcatgatgggcctgttgactaacctggcggaccg |
| | IGLVWRSMEHPGKLLFAPNLL | cgagttggtgcacatgattaactgggctaagcgggtgccg |
| | LDRNQGKCVEGGVEIFDMLLA | ggcttcgtggacctgaccctgcacgaccaagtgcacctcc |
| | TSSRFRMMNLQGEEFVCLKSI | tggaatgcgcctggatggaaatcctcatgatcggcctcgtg |
| | ILLNSGVYTFLSSTLKSLEEKD | tggagatccatggagcatcccggaaagctcctgtttgcac |
| | HIHRVLDKITDTLIHLMAKAGLT | ccaacctcctgcttgatcgcaaccagggaaaatgcgtgg |
| | LQQQHQRLAQLLLILSHIRHM | aagggggtgtcgagattttcgacatgctgctcgccacctctt |
| | SNKRMEHLYSMKCKNVVPLS | cccggttccggatgatgaatctgcagggagaagagttcgt |
| | DLLLEMLDAHRLGTGAEDPRP | gtgtctgaagtcaatcatcctgctgaactccggggtctatac |
| | SRKRRSLGDVGEVQLVESGG | cttcctgagctcgaccctcaagtcactggaggaaaaaga |
| | GLVQPGGSLRLSCAVSGFALS | ccacatccatcgcgtgctcgataagatcaccgacaccctt |
| | NHGMSWVRRAPGKGLEWVS | atccatctcatggcgaaggctggactgaccctgcaacagc |
| | GIVYSGSTYYAASVKGRFTISR | agcaccagaggctggcccagttgctgctgattctgagcca |
| | DNSRNTLYLQMNSLRPEDTAI | catccggcacatgtcgaacaagaggatggaacacctgta |
| | YYCSAHGGESDVWGQGTTVT | cagcatgaagtgcaagaacgtcgtgcctctgtccgatctg |
| | VSSASGGGGSGGRASGGGG | ctcctggaaatgctggacgcgcacagactcggaaccggc |
| | SDIQLTQSPSSLSASVGDRVTI | gcggaagacccccggccctccaggaagcgaaggtccct |
| | TCRASQSISSYLNWYQQKPG | cggagacgtgggtgaagtgcaattggtggaatcaggggg |
| | KAPKLLIYAASSLQSGVPSRFS | aggacttgtgcagcctggaggatcgctgagactgtcatgtg |
| | GSGSGTDFTLTISSLQPEDFA | ccgtgtccggctttgccctgtccaaccacgggatgtcctgg |
| | TYYCQQSYSTPYTFGQGTKV | gtccgccgcgcgcctggaaagggcctcgaatgggtgtcg |
| | EIKTTTPAPRPPTPAPTIASQP | ggtattgtgtacagcggtagcacctactatgccgcatccgt |
| | LSLRPEACRPAAGGAVHTRG | gaaggggagattcaccatcagccgggacaactccagga |
| | LDFACDIYIWAPLAGTCGVLLL | acactctgtacctccaaatgaattcgctgaggccagagga |
| | SLVITLYCKRGRKKLLYIFKQP | cactgccatctactactgctccgcgcatggcggagagtcc |
| | FMRPVQTTQEEDGCSCRFPE | gacgtctggggacaggggaccaccgtgaccgtgtctagc |
| | EEEGGCELRVKFSRSADAPA | gcgtccggcggaggcggcagcgggggtcgggcatcag |
| | YQQGQNQLYNELNLGRREEY | ggggcggcggatcggacatccagctcacccagtccccg |
| | DVLDKRRGRDPEMGGKPRRK | agctcgctgtccgcctccgtgggagatcgggtcaccatca |
| | NPQEGLYNELQKDKMAEAYS | cgtgccgcgccagccagtcgatttcctcctacctgaactgg |
| | EIGMKGERRRGKGHDGLYQG | taccaacagaagcccggaaaagccccgaagcttctcatc |
| | LSTATKDTYDALHMQALPPR | tacgccgcctcgagcctgcagtcaggagtgccctcacggt |
| | (SEQ ID NO: 999) | tctccggctccggttccggtactgatttcaccctgaccatttcc |
| | | tccctgcaaccggaggacttcgctacttactactgccagca |
| | | gtcgtactccaccccctacactttcggacaaggcaccaag |
| | | gtcgaaatcaagaccactaccccagcaccgaggccacc |
| | | caccccggctcctaccatcgcctcccagcctctgtccctgc |
| | | gtccggaggcatgtagacccgcagctggtggggccgtgc |
| | | atacccggggtcttgacttcgcctgcgatatctacatttggg |
| | | cccctctggctggtacttgcggggtcctgctgctttcactcgt |
| | | gatcactctttactgtaagcgcggtcggaagaagctgctgt |
| | | acatctttaagcaacccttcatgaggcctgtgcagactactc |
| | | aagaggaggacggctgttcatgccggttcccagaggagg |
| | | aggaaggcggctgcgaactgcgcgtgaaattcagccgc |
| | | agcgcagatgctccagcctaccagcaggggcagaacca |
| | | gctctacaacgaactcaatcttggtcggagagaggagtac |
| | | gacgtgctggacaagcggagaggacgggacccagaaa |
| | | tgggcgggaagccgcgcagaaagaatccccaagaggg |
| | | cctgtacaacgagctccaaaaggataagatggcagaag |
| | | cctatagcgagattggtatgaaaggggaacgcagaaga |
| | | ggcaaaggccacgacggactgtaccagggactcagca |
| | | ccgccaccaaggacacctatgacgctcttcacatgcagg |
| | | ccctgccgcctcgg (SEQ ID NO: 1059) |
| SP-Linker 2- | MALPVTALLLPLALLLHAARPS | atggccctccctgtcaccgccctgctgcttccgctggctcttc |
| ERmut1-Furin | LALSLTADQMVSALLDAEPPIL | tgctccacgccgctcggcccTcgttggcactttccctgactg |
| cleavage site 3- | YSEYDPTRPFSEASMMGLLT | ccgaccagatggtgtccgcccttctggacgccgagcctcc |
| BCMA CAR | NLADRELVHMINWAKRVPGF | aattctgtactcggagtacgatccgactcgcccgttctccga |
| | VDLALHDQVHLLECAWMEILM | agccagcatgatgggcctgttgactaacctggcggaccg |
| | IGLVWRSMEHPGKLLFAPNLL | cgagttggtgcacatgattaactgggctaagcgggtgccg |
| | LDRNQGKCVEGGVEIFDMLLA | ggcttcgtggacctggccctgcacgaccaagtgcacctcc |
| | TSSRFRMMNLQGEEFVCLKSI | tggaatgcgcctggatggaaatcctcatgatcggcctcgtg |
| | ILLNSGVYTFLSSTLKSLEEKD | tggagatccatggagcatcccggaaagctcctgtttgcac |
| | HIHRVLDKITDTLIHLMAKAGLT | ccaacctcctgcttgatcgcaaccagggaaaatgcgtgg |
| | LQQQHQRLAQLLLILSHIRHM | aagggggtgtcgagattttcgacatgctgctcgccacctctt |
| | SSKRMEHLYSMKCKNVVPLS | cccggttccggatgatgaatctgcagggagaagagttcgt |
| | DLLLEMLDAHRLGTGAEDPRP | gtgtctgaagtcaatcatcctgctgaactccggggtctatac |
| | SRKRREVQLVESGGGLVQPG | cttcctgagctcgaccctcaagtcactggaggaaaaaga |
| | GSLRLSCAVSGFALSNHGMS | ccacatccatcgcgtgctcgataagatcaccgacaccctt |
| | WVRRAPGKGLEWVSGIVYSG | atccatctcatggcgaaggctggactgaccctgcaacagc |
| | STYYAASVKGRFTISRDNSRN | agcaccagaggctggcccagttgctgctgattctgagcca |
| | TLYLQMNSLRPEDTAIYYCSA | catccggcacatgtcgtccaagaggatggaacacctgta |
| | HGGESDVWGQGTTVTVSSAS | cagcatgaagtgcaagaacgtcgtgcctctgtccgatctg |
| | GGGGSGGRASGGGGSDIQLT | ctcctggaaatgctggacgcgcacagactcGggacggg |
| | QSPSSLSASVGDRVTITCRAS | agctgaagatccacgacccagcagaaagcgacgggaa |
| | QSISSYLNWYQQKPGKAPKLL | gtgcaattggtggaatcagggggaggacttgtgcagcctg |
| | IYAASSLQSGVPSRFSGSGSG | gaggatcgctgagactgtcatgtgccgtgtccggctttgcc |
| | TDFTLTISSLQPEDFATYYCQ | ctgtccaaccacgggatgtcctgggtccgccgcgcgcctg |
| | QSYSTPYTFGQGTKVEIKTTT | gaaagggcctcgaatgggtgtcgggtattgtgtacagcgg |
| | PAPRPPTPAPTIASQPLSLRPE | tagcacctactatgccgcatccgtgaaggggagattcacc |
| | ACRPAAGGAVHTRGLDFACDI | atcagccgggacaactccaggaacactctgtacctccaa |
| | YIWAPLAGTCGVLLLSLVITLY | atgaattcgctgaggccagaggacactgccatctactact |
| | CKRGRKKLLYIFKQPFMRPVQ | gctccgcgcatggcggagagtccgacgtctggggacag |
| | TTQEEDGCSCRFPEEEEGGC | gggaccaccgtgaccgtgtctagcgcgtccggcggaggc |
| | ELRVKFSRSADAPAYQQGQN | ggcagcgggggtcgggcatcagggggcggcggatcgg |
| | QLYNELNLGRREEYDVLDKR | acatccagctcacccagtccccgagctcgctgtccgcctc |
| | RGRDPEMGGKPRRKNPQEG | cgtgggagatcgggtcaccatcacgtgccgcgccagcca |
| | LYNELQKDKMAEAYSEIGMKG | gtcgatttcctcctacctgaactggtaccaacagaagcccg |
| | ERRRGKGHDGLYQGLSTATK | gaaaagccccgaagcttctcatctacgccgcctcgagcct |
| | DTYDALHMQALPPR | gcagtcaggagtgccctcacggttctccggctccggttccg |
| | (SEQ ID NO: 1000) | gtactgatttcaccctgaccatttcctccctgcaaccggagg |
| | | acttcgctacttactactgccagcagtcgtactccaccccct |
| | | acactttcggacaaggcaccaaggtcgaaatcaagacc |
| | | actaccccagcaccgaggccacccaccccggctcctacc |
| | | atcgcctcccagcctctgtccctgcgtccggaggcatgtag |
| | | acccgcagctggtggggccgtgcatacccggggtcttgac |
| | | ttcgcctgcgatatctacatttgggcccctctggctggtacttg |
| | | cggggtcctgctgctttcactcgtgatcactctttactgtaagc |
| | | gcggtcggaagaagctgctgtacatctttaagcaacccttc |
| | | atgaggcctgtgcagactactcaagaggaggacggctgtt |
| | | catgccggttcccagaggaggaggaaggcggctgcgaa |
| | | ctgcgcgtgaaattcagccgcagcgcagatgctccagcct |
| | | accagcaggggcagaaccagctctacaacgaactcaat |
| | | cttggtcggagagaggagtacgacgtgctggacaagcg |
| | | gagaggacgggacccagaaatgggcgggaagccgcg |
| | | cagaaagaatccccaagagggcctgtacaacgagctcc |
| | | aaaaggataagatggcagaagcctatagcgagattggta |
| | | tgaaaggggaacgcagaagaggcaaaggccacgacg |
| | | gactgtaccagggactcagcaccgccaccaaggacacc |
| | | tatgacgctcttcacatgcaggccctgccgcctcgg |
| | | (SEQ ID NO: 1060) |
| SP-Linker 2- | MALPVTALLLPLALLLHAARPS | atggccctccctgtcaccgccctgctgcttccgctggctcttc |
| ERmut2-Furin | LALSLTADQMVSALLDAEPPIL | tgctccacgccgctcggcccTcgttggcactttccctgactg |
| cleavage site 3- | YSEYDPTRPFSEASMMGLLT | ccgaccagatggtgtccgcccttctggacgccgagcctcc |
| BCMA CAR | NLADRELVHMINWAKRVPGF | aattctgtactcggagtacgatccgactcgcccgttctccga |
| | VDLTLHDQVHLLECAWMEILM | agccagcatgatgggcctgttgactaacctggcggaccg |
| | IGLVWRSMEHPGKLLFAPNLL | cgagttggtgcacatgattaactgggctaagcgggtgccg |
| | LDRNQGKCVEGGVEIFDMLLA | ggcttcgtggacctgaccctgcacgaccaagtgcacctcc |
| | TSSRFRMMNLQGEEFVCLKSI | tggaatgcgcctggatggaaatcctcatgatcggcctcgtg |
| | ILLNSGVYTFLSSTLKSLEEKD | tggagatccatggagcatcccggaaagctcctgtttgcac |
| | HIHRVLDKITDTLIHLMAKAGLT | ccaacctcctgcttgatcgcaaccagggaaaatgcgtgg |
| | LQQQHQRLAQLLLILSHIRHM | aagggggtgtcgagattttcgacatgctgctcgccacctctt |
| | SNKRMEHLYSMKCKNVVPLS | cccggttccggatgatgaatctgcagggagaagagttcgt |
| | DLLLEMLDAHRLGTGAEDPRP | gtgtctgaagtcaatcatcctgctgaactccggggtctatac |
| | SRKRREVQLVESGGGLVQPG | cttcctgagctcgaccctcaagtcactggaggaaaaaga |
| | GSLRLSCAVSGFALSNHGMS | ccacatccatcgcgtgctcgataagatcaccgacaccctt |
| | WVRRAPGKGLEWVSGIVYSG | atccatctcatggcgaaggctggactgaccctgcaacagc |
| | STYYAASVKGRFTISRDNSRN | agcaccagaggctggcccagttgctgctgattctgagcca |
| | TLYLQMNSLRPEDTAIYYCSA | catccggcacatgtcgaacaagaggatggaacacctgta |
| | HGGESDVWGQGTTVTVSSAS | cagcatgaagtgcaagaacgtcgtgcctctgtccgatctg |
| | GGGGSGGRASGGGGSDIQLT | ctcctggaaatgctggacgcgcacagactcgggacggg |
| | QSPSSLSASVGDRVTITCRAS | agctgaagatccacgacccagcagaaagcgacgggaa |
| | QSISSYLNWYQQKPGKAPKLL | gtgcaattggtggaatcagggggaggacttgtgcagcctg |
| | IYAASSLQSGVPSRFSGSGSG | gaggatcgctgagactgtcatgtgccgtgtccggctttgcc |
| | TDFTLTISSLQPEDFATYYCQ | ctgtccaaccacgggatgtcctgggtccgccgcgcgcctg |
| | QSYSTPYTFGQGTKVEIKTTT | gaaagggcctcgaatgggtgtcgggtattgtgtacagcgg |
| | PAPRPPTPAPTIASQPLSLRPE | tagcacctactatgccgcatccgtgaaggggagattcacc |
| | ACRPAAGGAVHTRGLDFACDI | atcagccgggacaactccaggaacactctgtacctccaa |
| | YIWAPLAGTCGVLLLSLVITLY | atgaattcgctgaggccagaggacactgccatctactact |
| | CKRGRKKLLYIFKQPFMRPVQ | gctccgcgcatggcggagagtccgacgtctggggacag |
| | TTQEEDGCSCRFPEEEEGGC | gggaccaccgtgaccgtgtctagcgcgtccggcggaggc |
| | ELRVKFSRSADAPAYQQGQN | ggcagcgggggtcgggcatcagggggcggcggatcgg |
| | QLYNELNLGRREEYDVLDKR | acatccagctcacccagtccccgagctcgctgtccgcctc |
| | RGRDPEMGGKPRRKNPQEG | cgtgggagatcgggtcaccatcacgtgccgcgccagcca |
| | LYNELQKDKMAEAYSEIGMKG | gtcgatttcctcctacctgaactggtaccaacagaagcccg |
| | ERRRGKGHDGLYQGLSTATK | gaaaagccccgaagcttctcatctacgccgcctcgagcct |
| | DTYDALHMQALPPR | gcagtcaggagtgccctcacggttctccggctccggttccg |
| | (SEQ ID NO: 1001) | gtactgatttcaccctgaccatttcctccctgcaaccggagg |
| | | acttcgctacttactactgccagcagtcgtactccaccccct |
| | | acactttcggacaaggcaccaaggtcgaaatcaagacc |
| | | actaccccagcaccgaggccacccaccccggctcctacc |
| | | atcgcctcccagcctctgtccctgcgtccggaggcatgtag |
| | | acccgcagctggtggggccgtgcatacccggggtcttgac |
| | | ttcgcctgcgatatctacatttgggcccctctggctggtacttg |
| | | cggggtcctgctgctttcactcgtgatcactctttactgtaagc |
| | | gcggtcggaagaagctgctgtacatctttaagcaacccttc |
| | | atgaggcctgtgcagactactcaagaggaggacggctgtt |
| | | catgccggttcccagaggaggaggaaggcggctgcgaa |
| | | ctgcgcgtgaaattcagccgcagcgcagatgctccagcct |
| | | accagcaggggcagaaccagctctacaacgaactcaat |
| | | cttggtcggagagaggagtacgacgtgctggacaagcg |
| | | gagaggacgggacccagaaatgggcgggaagccgcg |
| | | cagaaagaatccccaagagggcctgtacaacgagctcc |
| | | aaaaggataagatggcagaagcctatagcgagattggta |
| | | tgaaaggggaacgcagaagaggcaaaggccacgacg |
| | | gactgtaccagggactcagcaccgccaccaaggacacc |
| | | tatgacgctcttcacatgcaggccctgccgcctcgg |
| | | (SEQ ID NO: 1061) |
| SP-Linker 3- | MALPVTALLLPLALLLHAARPD | atggccctccctgtcaccgccctgctgcttccgctggctcttc |
| ERmut1-Furin | SLALSLTADQMVSALLDAEPPI | tgctccacgccgctcggcccgattcgttggcactttccctga |
| cleavage site 2- | LYSEYDPTRPFSEASMMGLLT | ctgccgaccagatggtgtccgcccttctggacgccgagcc |
| CD19 CAR2 | NLADRELVHMINWAKRVPGF | tccaattctgtactcggagtacgatccgactcgcccgttctc |
| | VDLALHDQVHLLECAWMEILM | cgaagccagcatgatgggcctgttgactaacctggcgga |
| | IGLVWRSMEHPGKLLFAPNLL | ccgcgagttggtgcacatgattaactgggctaagcgggtg |
| | LDRNQGKCVEGGVEIFDMLLA | ccgggcttcgtggacctggccctgcacgaccaagtgcac |
| | TSSRFRMMNLQGEEFVCLKSI | ctcctggaatgcgcctggatggaaatcctcatgatcggcct |
| | ILLNSGVYTFLSSTLKSLEEKD | cgtgtggagatccatggagcatcccggaaagctcctgtttg |
| | HIHRVLDKITDTLIHLMAKAGLT | cacccaacctcctgcttgatcgcaaccagggaaaatgcgt |
| | LQQQHQRLAQLLLILSHIRHM | ggaagggggtgtcgagattttcgacatgctgctcgccacct |
| | SSKRMEHLYSMKCKNVVPLS | cttcccggttccggatgatgaatctgcagggagaagagttc |
| | DLLLEMLDAHRLGTGAEDPRP | gtgtgtctgaagtcaatcatcctgctgaactccggggtctat |
| | SRKRRSLGDVGEIVMTQSPAT | accttcctgagctcgaccctcaagtcactggaggaaaaa |
| | LSLSPGERATLSCRASQDISK | gaccacatccatcgcgtgctcgataagatcaccgacacc |
| | YLNWYQQKPGQAPRLLIYHTS | cttatccatctcatggcgaaggctggactgaccctgcaaca |
| | RLHSGIPARFSGSGSGTDYTL | gcagcaccagaggctggcccagttgctgctgattctgagc |
| | TISSLQPEDFAVYFCQQGNTL | cacatccggcacatgtcgtccaagaggatggaacacctg |
| | PYTFGQGTKLEIKGGGGSGG | tacagcatgaagtgcaagaacgtcgtgcctctgtccgatct |
| | GGSGGGGSQVQLQESGPGL | gctcctggaaatgctggacgcgcacagactcggaaccg |
| | VKPSETLSLTCTVSGVSLPDY | gcgcggaagacccccggccctccaggaagcgaaggtc |
| | GVSWIRQPPGKGLEWIGVIW | cctcggagacgtgggtgaaattgtgatgacccagtcaccc |
| | GSETTYYSSSLKSRVTISKDN | gccactcttagcctttcacccggtgagcgcgcaaccctgtc |
| | SKNQVSLKLSSVTAADTAVYY | ttgcagagcctcccaagacatctcaaaataccttaattggt |
| | CAKHYYYGGSYAMDYWGQG | atcaacagaagcccggacaggctcctcgccttctgatcta |
| | TLVTVSSTTTPAPRPPTPAPTI | ccacaccagccggctccattctggaatccctgccaggttc |
| | ASQPLSLRPEACRPAAGGAV | agcggtagcggatctgggaccgactacaccctcactatca |
| | HTRGLDFACDIYIWAPLAGTC | gctcactgcagccagaggacttcgctgtctatttctgtcagc |
| | GVLLLSLVITLYCKRGRKKLLYI | aagggaacaccctgccctacacctttggacagggcacca |
| | FKQPFMRPVQTTQEEDGCSC | agctcgagattaaaggtggaggtggcagcggaggaggt |
| | RFPEEEEGGCELRVKFSRSA | gggtccggcggtggaggaagccaggtccaactccaaga |
| | DAPAYQQGQNQLYNELNLGR | aagcggaccgggtcttgtgaagccatcagaaactctttca |
| | REEYDVLDKRRGRDPEMGGK | ctgacttgtactgtgagcggagtgtctctccccgattacggg |
| | PRRKNPQEGLYNELQKDKMA | gtgtcttggatcagacagccaccggggaagggtctggaat |
| | EAYSEIGMKGERRRGKGHDG | ggattggagtgatttggggctctgagactacttactactcttc |
| | LYQGLSTATKDTYDALHMQAL | atccctcaagtcacgcgtcaccatctcaaaggacaactct |
| | PPR (SEQ ID NO: 1002) | aagaatcaggtgtcactgaaactgtcatctgtgaccgcag |
| | | ccgacaccgccgtgtactattgcgctaagcattactattatg |
| | | gcgggagctacgcaatggattactggggacagggtactct |
| | | ggtcaccgtgtccagcaccactaccccagcaccgaggcc |
| | | acccaccccggctcctaccatcgcctcccagcctctgtccc |
| | | tgcgtccggaggcatgtagacccgcagctggtggggccg |
| | | tgcatacccggggtcttgacttcgcctgcgatatctacatttg |
| | | ggcccctctggctggtacttgcggggtcctgctgctttcactc |
| | | gtgatcactctttactgtaagcgcggtcggaagaagctgct |
| | | gtacatctttaagcaacccttcatgaggcctgtgcagacta |
| | | ctcaagaggaggacggctgttcatgccggttcccagagg |
| | | aggaggaaggcggctgcgaactgcgcgtgaaattcagc |
| | | cgcagcgcagatgctccagcctaccagcaggggcagaa |
| | | ccagctctacaacgaactcaatcttggtcggagagagga |
| | | gtacgacgtgctggacaagcggagaggacgggaccca |
| | | gaaatgggcgggaagccgcgcagaaagaatccccaag |
| | | agggcctgtacaacgagctccaaaaggataagatggca |
| | | gaagcctatagcgagattggtatgaaaggggaacgcag |
| | | aagaggcaaaggccacgacggactgtaccagggactc |
| | | agcaccgccaccaaggacacctatgacgctcttcacatg |
| | | caggccctgccgcctcgg (SEQ ID NO: 1062) |
| SP-Linker 3- | MALPVTALLLPLALLLHAARPD | atggccctccctgtcaccgccctgctgcttccgctggctcttc |
| ERmut2-Furin | SLALSLTADQMVSALLDAEPPI | tgctccacgccgctcggcccgattcgttggcactttccctga |
| cleavage site 2- | LYSEYDPTRPFSEASMMGLLT | ctgccgaccagatggtgtccgcccttctggacgccgagcc |
| CD19 CAR2 | NLADRELVHMINWAKRVPGF | tccaattctgtactcggagtacgatccgactcgcccgttctc |
| | VDLTLHDQVHLLECAWMEILM | cgaagccagcatgatgggcctgttgactaacctggcgga |
| | IGLVWRSMEHPGKLLFAPNLL | ccgcgagttggtgcacatgattaactgggctaagcgggtg |
| | LDRNQGKCVEGGVEIFDMLLA | ccgggcttcgtggacctgaccctgcacgaccaagtgcac |
| | TSSRFRMMNLQGEEFVCLKSI | ctcctggaatgcgcctggatggaaatcctcatgatcggcct |
| | ILLNSGVYTFLSSTLKSLEEKD | cgtgtggagatccatggagcatcccggaaagctcctgtttg |
| | HIHRVLDKITDTLIHLMAKAGLT | cacccaacctcctgcttgatcgcaaccagggaaaatgcgt |
| | LQQQHQRLAQLLLILSHIRHM | ggaagggggtgtcgagattttcgacatgctgctcgccacct |
| | SNKRMEHLYSMKCKNVVPLS | cttcccggttccggatgatgaatctgcagggagaagagttc |
| | DLLLEMLDAHRLGTGAEDPRP | gtgtgtctgaagtcaatcatcctgctgaactccggggtctat |
| | SRKRRSLGDVGEIVMTQSPAT | accttcctgagctcgaccctcaagtcactggaggaaaaa |
| | LSLSPGERATLSCRASQDISK | gaccacatccatcgcgtgctcgataagatcaccgacacc |
| | YLNWYQQKPGQAPRLLIYHTS | cttatccatctcatggcgaaggctggactgaccctgcaaca |
| | RLHSGIPARFSGSGSGTDYTL | gcagcaccagaggctggcccagttgctgctgattctgagc |
| | TISSLQPEDFAVYFCQQGNTL | cacatccggcacatgtcgaacaagaggatggaacacct |
| | PYTFGQGTKLEIKGGGGSGG | gtacagcatgaagtgcaagaacgtcgtgcctctgtccgat |
| | GGSGGGGSQVQLQESGPGL | ctgctcctggaaatgctggacgcgcacagactcggaacc |
| | VKPSETLSLTCTVSGVSLPDY | ggcgcggaagacccccggccctccaggaagcgaaggt |
| | GVSWIRQPPGKGLEWIGVIW | ccctcggagacgtgggtgaaattgtgatgacccagtcacc |
| | GSETTYYSSSLKSRVTISKDN | cgccactcttagcctttcacccggtgagcgcgcaaccctgt |
| | SKNQVSLKLSSVTAADTAVYY | cttgcagagcctcccaagacatctcaaaataccttaattgg |
| | CAKHYYYGGSYAMDYWGQG | tatcaacagaagcccggacaggctcctcgccttctgatcta |
| | TLVTVSSTTTPAPRPPTPAPTI | ccacaccagccggctccattctggaatccctgccaggttc |
| | ASQPLSLRPEACRPAAGGAV | agcggtagcggatctgggaccgactacaccctcactatca |
| | HTRGLDFACDIYIWAPLAGTC | gctcactgcagccagaggacttcgctgtctatttctgtcagc |
| | GVLLLSLVITLYCKRGRKKLLYI | aagggaacaccctgccctacacctttggacagggcacca |
| | FKQPFMRPVQTTQEEDGCSC | agctcgagattaaaggtggaggtggcagcggaggaggt |
| | RFPEEEEGGCELRVKFSRSA | gggtccggcggtggaggaagccaggtccaactccaaga |
| | DAPAYQQGQNQLYNELNLGR | aagcggaccgggtcttgtgaagccatcagaaactctttca |
| | REEYDVLDKRRGRDPEMGGK | ctgacttgtactgtgagcggagtgtctctccccgattacggg |
| | PRRKNPQEGLYNELQKDKMA | gtgtcttggatcagacagccaccggggaagggtctggaat |
| | EAYSEIGMKGERRRGKGHDG | ggattggagtgatttggggctctgagactacttactactcttc |
| | LYQGLSTATKDTYDALHMQAL | atccctcaagtcacgcgtcaccatctcaaaggacaactct |
| | PPR (SEQ ID NO: 1003) | aagaatcaggtgtcactgaaactgtcatctgtgaccgcag |
| | | ccgacaccgccgtgtactattgcgctaagcattactattatg |
| | | gcgggagctacgcaatggattactggggacagggtactct |
| | | ggtcaccgtgtccagcaccactaccccagcaccgaggcc |
| | | acccaccccggctcctaccatcgcctcccagcctctgtccc |
| | | tgcgtccggaggcatgtagacccgcagctggtggggccg |
| | | tgcatacccggggtcttgacttcgcctgcgatatctacatttg |
| | | ggcccctctggctggtacttgcggggtcctgctgctttcactc |
| | | gtgatcactctttactgtaagcgcggtcggaagaagctgct |
| | | gtacatctttaagcaacccttcatgaggcctgtgcagacta |
| | | ctcaagaggaggacggctgttcatgccggttcccagagg |
| | | aggaggaaggcggctgcgaactgcgcgtgaaattcagc |
| | | cgcagcgcagatgctccagcctaccagcaggggcagaa |
| | | ccagctctacaacgaactcaatcttggtcggagagagga |
| | | gtacgacgtgctggacaagcggagaggacgggaccca |
| | | gaaatgggcgggaagccgcgcagaaagaatccccaag |
| | | agggcctgtacaacgagctccaaaaggataagatggca |
| | | gaagcctatagcgagattggtatgaaaggggaacgcag |
| | | aagaggcaaaggccacgacggactgtaccagggactc |
| | | agcaccgccaccaaggacacctatgacgctcttcacatg |
| | | caggccctgccgcctcgg (SEQ ID NO: 1063) |
| SP-Linker 3- | MALPVTALLLPLALLLHAARPD | atggccctccctgtcaccgccctgctgcttccgctggctcttc |
| ERmut1-Furin | SLALSLTADQMVSALLDAEPPI | tgctccacgccgctcggcccgattcgttggcactttccctga |
| cleavage site 3- | LYSEYDPTRPFSEASMMGLLT | ctgccgaccagatggtgtccgcccttctggacgccgagcc |
| CD19 CAR2 | NLADRELVHMINWAKRVPGF | tccaattctgtactcggagtacgatccgactcgcccgttctc |
| | VDLALHDQVHLLECAWMEILM | cgaagccagcatgatgggcctgttgactaacctggcgga |
| | IGLVWRSMEHPGKLLFAPNLL | ccgcgagttggtgcacatgattaactgggctaagcgggtg |
| | LDRNQGKCVEGGVEIFDMLLA | ccgggcttcgtggacctggccctgcacgaccaagtgcac |
| | TSSRFRMMNLQGEEFVCLKSI | ctcctggaatgcgcctggatggaaatcctcatgatcggcct |
| | ILLNSGVYTFLSSTLKSLEEKD | cgtgtggagatccatggagcatcccggaaagctcctgtttg |
| | HIHRVLDKITDTLIHLMAKAGLT | cacccaacctcctgcttgatcgcaaccagggaaaatgcgt |
| | LQQQHQRLAQLLLILSHIRHM | ggaagggggtgtcgagattttcgacatgctgctcgccacct |
| | SSKRMEHLYSMKCKNVVPLS | cttcccggttccggatgatgaatctgcagggagaagagttc |
| | DLLLEMLDAHRLGTGAEDPRP | gtgtgtctgaagtcaatcatcctgctgaactccggggtctat |
| | SRKRREIVMTQSPATLSLSPG | accttcctgagctcgaccctcaagtcactggaggaaaaa |
| | ERATLSCRASQDISKYLNWYQ | gaccacatccatcgcgtgctcgataagatcaccgacacc |
| | QKPGQAPRLLIYHTSRLHSGIP | cttatccatctcatggcgaaggctggactgaccctgcaaca |
| | ARFSGSGSGTDYTLTISSLQP | gcagcaccagaggctggcccagttgctgctgattctgagc |
| | EDFAVYFCQQGNTLPYTFGQ | cacatccggcacatgtcgtccaagaggatggaacacctg |
| | GTKLEIKGGGGSGGGGSGGG | tacagcatgaagtgcaagaacgtcgtgcctctgtccgatct |
| | GSQVQLQESGPGLVKPSETL | gctcctggaaatgctggacgcgcacagactcgggacgg |
| | SLTCTVSGVSLPDYGVSWIRQ | gagctgaagatccacgacccagcagaaagcgacggga |
| | PPGKGLEWIGVIWGSETTYYS | aattgtgatgacccagtcacccgccactcttagcctttcacc |
| | SSLKSRVTISKDNSKNQVSLK | cggtgagcgcgcaaccctgtcttgcagagcctcccaaga |
| | LSSVTAADTAVYYCAKHYYYG | catctcaaaataccttaattggtatcaacagaagcccgga |
| | GSYAMDYWGQGTLVTVSSTT | caggctcctcgccttctgatctaccacaccagccggctcca |
| | TPAPRPPTPAPTIASQPLSLRP | ttctggaatccctgccaggttcagcggtagcggatctggga |
| | EACRPAAGGAVHTRGLDFAC | ccgactacaccctcactatcagctcactgcagccagagg |
| | DIYIWAPLAGTCGVLLLSLVITL | acttcgctgtctatttctgtcagcaagggaacaccctgccct |
| | YCKRGRKKLLYIFKQPFMRPV | acacctttggacagggcaccaagctcgagattaaaggtg |
| | QTTQEEDGCSCRFPEEEEGG | gaggtggcagcggaggaggtgggtccggcggtggagg |
| | CELRVKFSRSADAPAYQQGQ | aagccaggtccaactccaagaaagcggaccgggtcttgt |
| | NQLYNELNLGRREEYDVLDK | gaagccatcagaaactctttcactgacttgtactgtgagcg |
| | RRGRDPEMGGKPRRKNPQE | gagtgtctctccccgattacggggtgtcttggatcagacag |
| | GLYNELQKDKMAEAYSEIGMK | ccaccggggaagggtctggaatggattggagtgatttggg |
| | GERRRGKGHDGLYQGLSTAT | gctctgagactacttactactcttcatccctcaagtcacgcgt |
| | KDTYDALHMQALPPR | caccatctcaaaggacaactctaagaatcaggtgtcactg |
| | (SEQ ID NO: 1004) | aaactgtcatctgtgaccgcagccgacaccgccgtgtact |
| | | attgcgctaagcattactattatggcgggagctacgcaatg |
| | | gattactggggacagggtactctggtcaccgtgtccagca |
| | | ccactaccccagcaccgaggccacccaccccggctccta |
| | | ccatcgcctcccagcctctgtccctgcgtccggaggcatgt |
| | | agacccgcagctggtggggccgtgcatacccggggtctt |
| | | gacttcgcctgcgatatctacatttgggcccctctggctggta |
| | | cttgcggggtcctgctgctttcactcgtgatcactctttactgta |
| | | agcgcggtcggaagaagctgctgtacatctttaagcaacc |
| | | cttcatgaggcctgtgcagactactcaagaggaggacgg |
| | | ctgttcatgccggttcccagaggaggaggaaggcggctg |
| | | cgaactgcgcgtgaaattcagccgcagcgcagatgctcc |
| | | agcctaccagcaggggcagaaccagctctacaacgaac |
| | | tcaatcttggtcggagagaggagtacgacgtgctggaca |
| | | agcggagaggacgggacccagaaatgggcgggaagc |
| | | cgcgcagaaagaatccccaagagggcctgtacaacga |
| | | gctccaaaaggataagatggcagaagcctatagcgaga |
| | | ttggtatgaaaggggaacgcagaagaggcaaaggcca |
| | | cgacggactgtaccagggactcagcaccgccaccaagg |
| | | acacctatgacgctcttcacatgcaggccctgccgcctcg |
| | | g (SEQ ID NO: 1064) |
| SP-Linker 3- | MALPVTALLLPLALLLHAARPD | atggccctccctgtcaccgccctgctgcttccgctggctcttc |
| ERmut2-Furin | SLALSLTADQMVSALLDAEPPI | tgctccacgccgctcggcccgatTcgttggcactttccctg |
| cleavage site 3- | LYSEYDPTRPFSEASMMGLLT | actgccgaccagatggtgtccgcccttctggacgccgagc |
| CD19 CAR2 | NLADRELVHMINWAKRVPGF | ctccaattctgtactcggagtacgatccgactcgcccgttct |
| | VDLTLHDQVHLLECAWMEILM | ccgaagccagcatgatgggcctgttgactaacctggcgg |
| | IGLVWRSMEHPGKLLFAPNLL | accgcgagttggtgcacatgattaactgggctaagcgggt |
| | LDRNQGKCVEGGVEIFDMLLA | gccgggcttcgtggacctgaccctgcacgaccaagtgca |
| | TSSRFRMMNLQGEEFVCLKSI | cctcctggaatgcgcctggatggaaatcctcatgatcggcc |
| | ILLNSGVYTFLSSTLKSLEEKD | tcgtgtggagatccatggagcatcccggaaagctcctgttt |
| | HIHRVLDKITDTLIHLMAKAGLT | gcacccaacctcctgcttgatcgcaaccagggaaaatgc |
| | LQQQHQRLAQLLLILSHIRHM | gtggaagggggtgtcgagattttcgacatgctgctcgccac |
| | SNKRMEHLYSMKCKNVVPLS | ctcttcccggttccggatgatgaatctgcagggagaagagt |
| | DLLLEMLDAHRLGTGAEDPRP | tcgtgtgtctgaagtcaatcatcctgctgaactccggggtct |
| | SRKRREIVMTQSPATLSLSPG | ataccttcctgagctcgaccctcaagtcactggaggaaaa |
| | ERATLSCRASQDISKYLNWYQ | agaccacatccatcgcgtgctcgataagatcaccgacac |
| | QKPGQAPRLLIYHTSRLHSGIP | ccttatccatctcatggcgaaggctggactgaccctgcaac |
| | ARFSGSGSGTDYTLTISSLQP | agcagcaccagaggctggcccagttgctgctgattctgag |
| | EDFAVYFCQQGNTLPYTFGQ | ccacatccggcacatgtcgaacaagaggatggaacacc |
| | GTKLEIKGGGGSGGGGSGGG | tgtacagcatgaagtgcaagaacgtcgtgcctctgtccgat |
| | GSQVQLQESGPGLVKPSETL | ctgctcctggaaatgctggacgcgcacagactcgggacg |
| | SLTCTVSGVSLPDYGVSWIRQ | ggagctgaagatccacgacccagcagaaagcgacggg |
| | PPGKGLEWIGVIWGSETTYYS | aaattgtgatgacccagtcacccgccactcttagcctttcac |
| | SSLKSRVTISKDNSKNQVSLK | ccggtgagcgcgcaaccctgtcttgcagagcctcccaag |
| | LSSVTAADTAVYYCAKHYYYG | acatctcaaaataccttaattggtatcaacagaagcccgg |
| | GSYAMDYWGQGTLVTVSSTT | acaggctcctcgccttctgatctaccacaccagccggctcc |
| | TPAPRPPTPAPTIASQPLSLRP | attctggaatccctgccaggttcagcggtagcggatctggg |
| | EACRPAAGGAVHTRGLDFAC | accgactacaccctcactatcagctcactgcagccagag |
| | DIYIWAPLAGTCGVLLLSLVITL | gacttcgctgtctatttctgtcagcaagggaacaccctgccc |
| | YCKRGRKKLLYIFKQPFMRPV | tacacctttggacagggcaccaagctcgagattaaaggtg |
| | QTTQEEDGCSCRFPEEEEGG | gaggtggcagcggaggaggtgggtccggcggtggagg |
| | CELRVKFSRSADAPAYQQGQ | aagccaggtccaactccaagaaagcggaccgggtcttgt |
| | NQLYNELNLGRREEYDVLDK | gaagccatcagaaactctttcactgacttgtactgtgagcg |
| | RRGRDPEMGGKPRRKNPQE | gagtgtctctccccgattacggggtgtcttggatcagacag |
| | GLYNELQKDKMAEAYSEIGMK | ccaccggggaagggtctggaatggattggagtgatttggg |
| | GERRRGKGHDGLYQGLSTAT | gctctgagactacttactactcttcatccctcaagtcacgcgt |
| | KDTYDALHMQALPPR | caccatctcaaaggacaactctaagaatcaggtgtcactg |
| | (SEQ ID NO: 1005) | aaactgtcatctgtgaccgcagccgacaccgccgtgtact |
| | | attgcgctaagcattactattatggcgggagctacgcaatg |
| | | gattactggggacagggtactctggtcaccgtgtccagca |
| | | ccactaccccagcaccgaggccacccaccccggctccta |
| | | ccatcgcctcccagcctctgtccctgcgtccggaggcatgt |
| | | agacccgcagctggtggggccgtgcatacccggggtctt |
| | | gacttcgcctgcgatatctacatttgggcccctctggctggta |
| | | cttgcggggtcctgctgctttcactcgtgatcactctttactgta |
| | | agcgcggtcggaagaagctgctgtacatctttaagcaacc |
| | | cttcatgaggcctgtgcagactactcaagaggaggacgg |
| | | ctgttcatgccggttcccagaggaggaggaaggcggctg |
| | | cgaactgcgcgtgaaattcagccgcagcgcagatgctcc |
| | | agcctaccagcaggggcagaaccagctctacaacgaac |
| | | tcaatcttggtcggagagaggagtacgacgtgctggaca |
| | | agcggagaggacgggacccagaaatgggcgggaagc |
| | | cgcgcagaaagaatccccaagagggcctgtacaacga |
| | | gctccaaaaggataagatggcagaagcctatagcgaga |
| | | ttggtatgaaaggggaacgcagaagaggcaaaggcca |
| | | cgacggactgtaccagggactcagcaccgccaccaagg |
| | | acacctatgacgctcttcacatgcaggccctgccgcctcg |
| | | g (SEQ ID NO: 1065) |
| SP-Linker 3- | MALPVTALLLPLALLLHAARPD | atggccctccctgtcaccgccctgctgcttccgctggctcttc |
| ERmut1-Furin | SLALSLTADQMVSALLDAEPPI | tgctccacgccgctcggcccgattcgttggcactttccctga |
| cleavage site 2- | LYSEYDPTRPFSEASMMGLLT | ctgccgaccagatggtgtccgcccttctggacgccgagcc |
| CD123 CAR | NLADRELVHMINWAKRVPGF | tccaattctgtactcggagtacgatccgactcgcccgttctc |
| | VDLALHDQVHLLECAWMEILM | cgaagccagcatgatgggcctgttgactaacctggcgga |
| | IGLVWRSMEHPGKLLFAPNLL | ccgcgagttggtgcacatgattaactgggctaagcgggtg |
| | LDRNQGKCVEGGVEIFDMLLA | ccgggcttcgtggacctggccctgcacgaccaagtgcac |
| | TSSRFRMMNLQGEEFVCLKSI | ctcctggaatgcgcctggatggaaatcctcatgatcggcct |
| | ILLNSGVYTFLSSTLKSLEEKD | cgtgtggagatccatggagcatcccggaaagctcctgtttg |
| | HIHRVLDKITDTLIHLMAKAGLT | cacccaacctcctgcttgatcgcaaccagggaaaatgcgt |
| | LQQQHQRLAQLLLILSHIRHM | ggaagggggtgtcgagattttcgacatgctgctcgccacct |
| | SSKRMEHLYSMKCKNVVPLS | cttcccggttccggatgatgaatctgcagggagaagagttc |
| | DLLLEMLDAHRLGTGAEDPRP | gtgtgtctgaagtcaatcatcctgctgaactccggggtctat |
| | SRKRRSLGDVGQVQLVQSGA | accttcctgagctcgaccctcaagtcactggaggaaaaa |
| | EVKKPGASVKVSCKASGYTFT | gaccacatccatcgcgtgctcgataagatcaccgacacc |
| | GYYMHWVRQAPGQGLEWM | cttatccatctcatggcgaaggctggactgaccctgcaaca |
| | GWINPNSGGTNYAQKFQGRV | gcagcaccagaggctggcccagttgctgctgattctgagc |
| | TLTRDTSISTVYMELSRLRSD | cacatccggcacatgtcgtccaagaggatggaacacctg |
| | DTAVYYCARDMNILATVPFDI | tacagcatgaagtgcaagaacgtcgtgcctctgtccgatct |
| | WGQGTMVTVSSGGGGSGGG | gctcctggaaatgctggacgcgcacagactcggaaccg |
| | GSGGGGSDIQMTQSPSSLSA | gcgcggaagacccccggccctccaggaagcgaaggtc |
| | SVGDRVTITCRASQSISSYLN | cctcggagacgtgggtcaagtgcaactcgtccaaagcgg |
| | WYQQKPGKAPKLLIYAASSLQ | agcggaagtcaagaaacccggagcgagcgtgaaagtg |
| | SGVPSRFSGSGSGTDFTLTV | tcctgcaaagcctccggctacacctttacgggctactacat |
| | NSLQPEDFATYYCQQGDSVP | gcactgggtgcgccaggcaccaggacagggtcttgaatg |
| | LTFGGGTRLEIKTTTPAPRPPT | gatgggatggatcaaccctaattcgggcggaactaactac |
| | PAPTIASQPLSLRPEACRPAA | gcacagaagttccaggggagagtgactctgactcgggat |
| | GGAVHTRGLDFACDIYIWAPL | acctccatctcaactgtctacatggaactctcccgcttgcgg |
| | AGTCGVLLLSLVITLYCKRGRK | tcagatgatacggcagtgtactactgcgcccgcgacatga |
| | KLLYIFKQPFMRPVQTTQEED | atatcctggctaccgtgccgttcgacatctggggacaggg |
| | GCSCRFPEEEEGGCELRVKF | gactatggttactgtctcatcgggcggtggaggttcaggag |
| | SRSADAPAYQQGQNQLYNEL | gaggcggctcgggaggcggaggttcggacattcagatg |
| | NLGRREEYDVLDKRRGRDPE | acccagtccccatcctctctgtcggccagcgtcggagata |
| | MGGKPRRKNPQEGLYNELQK | gggtgaccattacctgtcgggcctcgcaaagcatctcctcg |
| | DKMAEAYSEIGMKGERRRGK | tacctcaactggtatcagcaaaagccgggaaaggcgcct |
| | GHDGLYQGLSTATKDTYDAL | aagctgctgatctacgccgcttcgagcttgcaaagcgggg |
| | HMQALPPR (SEQ ID NO: | tgccatccagattctcgggatcaggctcaggaaccgacttc |
| | 1006) | accctgaccgtgaacagcctccagccggaggactttgcc |
| | | acttactactgccagcagggagactccgtgccgcttactttc |
| | | ggggggggtacccgcctggagatcaagaccactacccc |
| | | agcaccgaggccacccaccccggctcctaccatcgcctc |
| | | ccagcctctgtccctgcgtccggaggcatgtagacccgca |
| | | gctggtggggccgtgcatacccggggtcttgacttcgcctg |
| | | cgatatctacatttgggcccctctggctggtacttgcggggt |
| | | cctgctgctttcactcgtgatcactctttactgtaagcgcggtc |
| | | ggaagaagctgctgtacatctttaagcaacccttcatgagg |
| | | cctgtgcagactactcaagaggaggacggctgttcatgcc |
| | | ggttcccagaggaggaggaaggcggctgcgaactgcgc |
| | | gtgaaattcagccgcagcgcagatgctccagcctaccag |
| | | caggggcagaaccagctctacaacgaactcaatcttggt |
| | | cggagagaggagtacgacgtgctggacaagcggagag |
| | | gacgggacccagaaatgggcgggaagccgcgcagaa |
| | | agaatccccaagagggcctgtacaacgagctccaaaag |
| | | gataagatggcagaagcctatagcgagattggtatgaaa |
| | | ggggaacgcagaagaggcaaaggccacgacggactgt |
| | | accagggactcagcaccgccaccaaggacacctatgac |
| | | gctcttcacatgcaggccctgccgcctcgg (SEQ ID NO: |
| | | 1066) |
| SP-Linker 3- | MALPVTALLLPLALLLHAARPD | atggccctccctgtcaccgccctgctgcttccgctggctcttc |
| ERmut2-Furin | SLALSLTADQMVSALLDAEPPI | tgctccacgccgctcggcccgatTcgttggcactttccctg |
| cleavage site 2- | LYSEYDPTRPFSEASMMGLLT | actgccgaccagatggtgtccgcccttctggacgccgagc |
| CD123 CAR | NLADRELVHMINWAKRVPGF | ctccaattctgtactcggagtacgatccgactcgcccgttct |
| | VDLTLHDQVHLLECAWMEILM | ccgaagccagcatgatgggcctgttgactaacctggcgg |
| | IGLVWRSMEHPGKLLFAPNLL | accgcgagttggtgcacatgattaactgggctaagcgggt |
| | LDRNQGKCVEGGVEIFDMLLA | gccgggcttcgtggacctgaccctgcacgaccaagtgca |
| | TSSRFRMMNLQGEEFVCLKSI | cctcctggaatgcgcctggatggaaatcctcatgatcggcc |
| | ILLNSGVYTFLSSTLKSLEEKD | tcgtgtggagatccatggagcatcccggaaagctcctgttt |
| | HIHRVLDKITDTLIHLMAKAGLT | gcacccaacctcctgcttgatcgcaaccagggaaaatgc |
| | LQQQHQRLAQLLLILSHIRHM | gtggaagggggtgtcgagattttcgacatgctgctcgccac |
| | SNKRMEHLYSMKCKNVVPLS | ctcttcccggttccggatgatgaatctgcagggagaagagt |
| | DLLLEMLDAHRLGTGAEDPRP | tcgtgtgtctgaagtcaatcatcctgctgaactccggggtct |
| | SRKRRSLGDVGQVQLVQSGA | ataccttcctgagctcgaccctcaagtcactggaggaaaa |
| | EVKKPGASVKVSCKASGYTFT | agaccacatccatcgcgtgctcgataagatcaccgacac |
| | GYYMHWVRQAPGQGLEWM | ccttatccatctcatggcgaaggctggactgaccctgcaac |
| | GWINPNSGGTNYAQKFQGRV | agcagcaccagaggctggcccagttgctgctgattctgag |
| | TLTRDTSISTVYMELSRLRSD | ccacatccggcacatgtcgaacaagaggatggaacacc |
| | DTAVYYCARDMNILATVPFDI | tgtacagcatgaagtgcaagaacgtcgtgcctctgtccgat |
| | WGQGTMVTVSSGGGGSGGG | ctgctcctggaaatgctggacgcgcacagactcggaacc |
| | GSGGGGSDIQMTQSPSSLSA | ggcgcggaagacccccggccctccaggaagcgaaggt |
| | SVGDRVTITCRASQSISSYLN | ccctcggagacgtgggtcaagtgcaactcgtccaaagcg |
| | WYQQKPGKAPKLLIYAASSLQ | gagcggaagtcaagaaacccggagcgagcgtgaaagt |
| | SGVPSRFSGSGSGTDFTLTV | gtcctgcaaagcctccggctacacctttacgggctactaca |
| | NSLQPEDFATYYCQQGDSVP | tgcactgggtgcgccaggcaccaggacagggtcttgaat |
| | LTFGGGTRLEIKTTTPAPRPPT | ggatgggatggatcaaccctaattcgggcggaactaacta |
| | PAPTIASQPLSLRPEACRPAA | cgcacagaagttccaggggagagtgactctgactcggga |
| | GGAVHTRGLDFACDIYIWAPL | tacctccatctcaactgtctacatggaactctcccgcttgcg |
| | AGTCGVLLLSLVITLYCKRGRK | gtcagatgatacggcagtgtactactgcgcccgcgacatg |
| | KLLYIFKQPFMRPVQTTQEED | aatatcctggctaccgtgccgttcgacatctggggacagg |
| | GCSCRFPEEEEGGCELRVKF | ggactatggttactgtctcatcgggcggtggaggttcagga |
| | SRSADAPAYQQGQNQLYNEL | ggaggcggctcgggaggcggaggttcggacattcagat |
| | NLGRREEYDVLDKRRGRDPE | gacccagtccccatcctctctgtcggccagcgtcggagat |
| | MGGKPRRKNPQEGLYNELQK | agggtgaccattacctgtcgggcctcgcaaagcatctcctc |
| | DKMAEAYSEIGMKGERRRGK | gtacctcaactggtatcagcaaaagccgggaaaggcgc |
| | GHDGLYQGLSTATKDTYDAL | ctaagctgctgatctacgccgcttcgagcttgcaaagcgg |
| | HMQALPPR (SEQ ID NO: | ggtgccatccagattctcgggatcaggctcaggaaccga |
| | 1007) | cttcaccctgaccgtgaacagcctccagccggaggacttt |
| | | gccacttactactgccagcagggagactccgtgccgctta |
| | | ctttcggggggggtacccgcctggagatcaagaccacta |
| | | ccccagcaccgaggccacccaccccggctcctaccatcg |
| | | cctcccagcctctgtccctgcgtccggaggcatgtagaccc |
| | | gcagctggtggggccgtgcatacccggggtcttgacttcg |
| | | cctgcgatatctacatttgggcccctctggctggtacttgcgg |
| | | ggtcctgctgctttcactcgtgatcactctttactgtaagcgcg |
| | | gtcggaagaagctgctgtacatctttaagcaacccttcatg |
| | | aggcctgtgcagactactcaagaggaggacggctgttcat |
| | | gccggttcccagaggaggaggaaggcggctgcgaactg |
| | | cgcgtgaaattcagccgcagcgcagatgctccagcctac |
| | | cagcaggggcagaaccagctctacaacgaactcaatctt |
| | | ggtcggagagaggagtacgacgtgctggacaagcgga |
| | | gaggacgggacccagaaatgggcgggaagccgcgca |
| | | gaaagaatccccaagagggcctgtacaacgagctccaa |
| | | aaggataagatggcagaagcctatagcgagattggtatg |
| | | aaaggggaacgcagaagaggcaaaggccacgacgg |
| | | actgtaccagggactcagcaccgccaccaaggacacct |
| | | atgacgctcttcacatgcaggccctgccgcctcgg (SEQ ID |
| | | NO: 1067) |
| SP-Linker 3- | MALPVTALLLPLALLLHAARPD | atggccctccctgtcaccgccctgctgcttccgctggctcttc |
| ERmut1-Furin | SLALSLTADQMVSALLDAEPPI | tgctccacgccgctcggcccgattcgttggcactttccctga |
| cleavage site- | LYSEYDPTRPFSEASMMGLLT | ctgccgaccagatggtgtccgcccttctggacgccgagcct |
| CD123 CAR | NLADRELVHMINWAKRVPGF | ccaattctgtactcggagtacgatccgactcgcccgttctcc |
| | VDLALHDQVHLLECAWMEILM | gaagccagcatgatgggcctgttgactaacctggcggacc |
| | IGLVWRSMEHPGKLLFAPNLL | gcgagttggtgcacatgattaactgggctaagcgggtgccg |
| | LDRNQGKCVEGGVEIFDMLLA | ggcttcgtggacctggccctgcacgaccaagtgcacctcct |
| | TSSRFRMMNLQGEEFVCLKSI | ggaatgcgcctggatggaaatcctcatgatcggcctcgtgt |
| | ILLNSGVYTFLSSTLKSLEEKD | ggagatccatggagcatcccggaaagctcctgtttgcaccc |
| | HIHRVLDKITDTLIHLMAKAGLT | aacctcctgcttgatcgcaaccagggaaaatgcgtggaag |
| | LQQQHQRLAQLLLILSHIRHM | ggggtgtcgagattttcgacatgctgctcgccacctcttccc |
| | SSKRMEHLYSMKCKNVVPLS | ggttccggatgatgaatctgcagggagaagagttcgtgtgt |
| | DLLLEMLDAHRLGTGAEDPRP | ctgaagtcaatcatcctgctgaactccggggtctataccttc |
| | SRKRRQVQLVQSGAEVKKPG | ctgagctcgaccctcaagtcactggaggaaaaagaccaca |
| | ASVKVSCKASGYTFTGYYMH | tccatcgcgtgctcgataagatcaccgacacccttatccatc |
| | WVRQAPGQGLEWMGWINPN | tcatggcgaaggctggactgaccctgcaacagcagcacca |
| | SGGTNYAQKFQGRVTLTRDT | gaggctggcccagttgctgctgattctgagccacatccggc |
| | SISTVYMELSRLRSDDTAVYY | acatgtcgtccaagaggatggaacacctgtacagcatgaa |
| | CARDMNILATVPFDIWGQGTM | gtgcaagaacgtcgtgcctctgtccgatctgctcctggaaat |
| | VTVSSGGGGSGGGGSGGGG | gctggacgcgcacagactcggaaccggcgcggaagaccc |
| | SDIQMTQSPSSLSASVGDRVT | ccggccctccaggaagcgaaggcaagtgcaactcgtccaa |
| | ITCRASQSISSYLNWYQQKPG | agcggagcggaagtcaagaaacccggagcgagcgtgaaa |
| | KAPKLLIYAASSLQSGVPSRFS | gtgtcctgcaaagcctccggctacacctttacgggctactac |
| | GSGSGTDFTLTVNSLQPEDFA | atgcactgggtgcgccaggcaccaggacagggtcttgaat |
| | TYYCQQGDSVPLTFGGGTRL | ggatgggatggatcaaccctaattcgggcggaactaacta |
| | EIKTTTPAPRPPTPAPTIASQP | cgcacagaagttccaggggagagtgactctgactcgggat |
| | LSLRPEACRPAAGGAVHTR | acctccatctcaactgtctacatggaactctcccgcttgcgg |
| | GLDFACDIYIWAPLAGTCG | tcagatgatacggcagtgtactactgcgcccgcgacatgaa |
| | VLLLSLVITLYCKRGRKKLL | tatcctggctaccgtgccgttcgacatctggggacagggga |
| | YIFKQPFMRPVQTTQEEDG | ctatggttactgtctcatcgggcggtggaggttcaggagga |
| | CSCRFPEEEEGGCELRVK | ggcggctcgggaggcggaggttcggacattcagatgaccc |
| | FSRSADAPAYQQGQNQLY | agtccccatcctctctgtcggccagcgtcggagatagggtg |
| | NELNLGRREEYDVLDKRR | accattacctgtcgggcctcgcaaagcatctcctcgtacctc |
| | GRDPEMGGKPRRKNPQE | aactggtatcagcaaaagccgggaaaggcgcctaagctgc |
| | GLYNELQKDKMAEAYSEIG | tgatctacgccgcttcgagcttgcaaagcggggtgccatcc |
| | MKGERRRGKGHDGLYQGL | agattctcgggatcaggctcaggaaccgacttcaccctgac |
| | STATKDTYDALHMQALPPR | cgtgaacagcctccagccggaggactttgccacttactact |
| | (SEQ ID NO: 1008) | gccagcagggagactccgtgccgcttactttcggggggggt |
| | | acccgcctggagatcaagaccactaccccagcaccgaggc |
| | | cacccaccccggctcctaccatcgcctcccagcctctgtccc |
| | | tgcgtccggaggcatgtagacccgcagctggtggggccgt |
| | | gcatacccggggtcttgacttcgcctgcgatatctacatttg |
| | | ggcccctctggctggtacttgcggggtcctgctgctttcactc |
| | | gtgatcactctttactgtaagcgcggtcggaagaagctgct |
| | | gtacatctttaagcaacccttcatgaggcctgtgcagactac |
| | | tcaagaggaggacggctgttcatgccggttcccagaggag |
| | | gaggaaggcggctgcgaactgcgcgtgaaattcagccgca |
| | | gcgcagatgctccagcctaccagcaggggcagaaccagct |
| | | ctacaacgaactcaatcttggtcggagagaggagtacgac |
| | | gtgctggacaagcggagaggacgggacccagaaatgggc |
| | | gggaagccgcgcagaaagaatccccaagagggcctgtac |
| | | aacgagctccaaaaggataagatggcagaagcctatagc |
| | | gagattggtatgaaaggggaacgcagaagaggcaaaggc |
| | | cacgacggactgtaccagggactcagcaccgccaccaagg |
| | | acacctatgacgctcttcacatgcaggccctgccgcctcgg |
| | | (SEQ ID NO: 1068) |
| SP-Linker 3- | MALPVTALLLPLALLLHAARPD | atggccctccctgtcaccgccctgctgcttccgctggctcttc |
| ERmut2-Furin | SLALSLTADQMVSALLDAEPPI | tgctccacgccgctcggcccgatTcgttggcactttccctg |
| cleavage site 3- | LYSEYDPTRPFSEASMMGLLT | actgccgaccagatggtgtccgcccttctggacgccgagc |
| CD123 CAR | NLADRELVHMINWAKRVPGF | ctccaattctgtactcggagtacgatccgactcgcccgttct |
| | VDLTLHDQVHLLECAWMEILM | ccgaagccagcatgatgggcctgttgactaacctggcgg |
| | IGLVWRSMEHPGKLLFAPNLL | accgcgagttggtgcacatgattaactgggctaagcgggt |
| | LDRNQGKCVEGGVEIFDMLLA | gccgggcttcgtggacctgaccctgcacgaccaagtgca |
| | TSSRFRMMNLQGEEFVCLKSI | cctcctggaatgcgcctggatggaaatcctcatgatcggcc |
| | ILLNSGVYTFLSSTLKSLEEKD | tcgtgtggagatccatggagcatcccggaaagctcctgttt |
| | HIHRVLDKITDTLIHLMAKAGLT | gcacccaacctcctgcttgatcgcaaccagggaaaatgc |
| | LQQQHQRLAQLLLILSHIRHM | gtggaagggggtgtcgagattttcgacatgctgctcgccac |
| | SNKRMEHLYSMKCKNVVPLS | ctcttcccggttccggatgatgaatctgcagggagaagagt |
| | DLLLEMLDAHRLGTGAEDPRP | tcgtgtgtctgaagtcaatcatcctgctgaactccggggtct |
| | SRKRRQVQLVQSGAEVKKPG | ataccttcctgagctcgaccctcaagtcactggaggaaaa |
| | ASVKVSCKASGYTFTGYYMH | agaccacatccatcgcgtgctcgataagatcaccgacac |
| | WVRQAPGQGLEWMGWINPN | ccttatccatctcatggcgaaggctggactgaccctgcaac |
| | SGGTNYAQKFQGRVTLTRDT | agcagcaccagaggctggcccagttgctgctgattctgag |
| | SISTVYMELSRLRSDDTAVYY | ccacatccggcacatgtcgaacaagaggatggaacacc |
| | CARDMNILATVPFDIWGQGTM | tgtacagcatgaagtgcaagaacgtcgtgcctctgtccgat |
| | VTVSSGGGGSGGGGSGGGG | ctgctcctggaaatgctggacgcgcacagactcgggacg |
| | SDIQMTQSPSSLSASVGDRVT | ggagctgaagatccacgacccagcagaaagcgacggc |
| | ITCRASQSISSYLNWYQQKPG | aagtgcaactcgtccaaagcggagcggaagtcaagaaa |
| | KAPKLLIYAASSLQSGVPSRFS | cccggagcgagcgtgaaagtgtcctgcaaagcctccggc |
| | GSGSGTDFTLTVNSLQPEDFA | tacacctttacgggctactacatgcactgggtgcgccaggc |
| | TYYCQQGDSVPLTFGGGTRL | accaggacagggtcttgaatggatgggatggatcaaccct |
| | EIKTTTPAPRPPTPAPTIASQP | aattcgggcggaactaactacgcacagaagttccagggg |
| | LSLRPEACRPAAGGAVHTRG | agagtgactctgactcgggatacctccatctcaactgtctac |
| | LDFACDIYIWAPLAGTCGVLLL | atggaactctcccgcttgcggtcagatgatacggcagtgta |
| | SLVITLYCKRGRKKLLYIFKQP | ctactgcgcccgcgacatgaatatcctggctaccgtgccgt |
| | FMRPVQTTQEEDGCSCRFPE | tcgacatctggggacaggggactatggttactgtctcatcg |
| | EEEGGCELRVKFSRSADAPA | ggcggtggaggttcaggaggaggcggctcgggaggcg |
| | YQQGQNQLYNELNLGRREEY | gaggttcggacattcagatgacccagtccccatcctctctgt |
| | DVLDKRRGRDPEMGGKPRRK | cggccagcgtcggagatagggtgaccattacctgtcggg |
| | NPQEGLYNELQKDKMAEAYS | cctcgcaaagcatctcctcgtacctcaactggtatcagcaa |
| | EIGMKGERRRGKGHDGLYQG | aagccgggaaaggcgcctaagctgctgatctacgccgct |
| | LSTATKDTYDALHMQALPPR | tcgagcttgcaaagcggggtgccatccagattctcgggat |
| | (SEQ ID NO: 1009) | caggctcaggaaccgacttcaccctgaccgtgaacagcc |
| | | tccagccggaggactttgccacttactactgccagcaggg |
| | | agactccgtgccgcttactttcggggggggtacccgcctgg |
| | | agatcaagaccactaccccagcaccgaggccacccacc |
| | | ccggctcctaccatcgcctcccagcctctgtccctgcgtccg |
| | | gaggcatgtagacccgcagctggtggggccgtgcatacc |
| | | cggggtcttgacttcgcctgcgatatctacatttgggcccctc |
| | | tggctggtacttgcggggtcctgctgctttcactcgtgatcac |
| | | tctttactgtaagcgcggtcggaagaagctgctgtacatcttt |
| | | aagcaacccttcatgaggcctgtgcagactactcaagag |
| | | gaggacggctgttcatgccggttcccagaggaggaggaa |
| | | ggcggctgcgaactgcgcgtgaaattcagccgcagcgc |
| | | agatgctccagcctaccagcaggggcagaaccagctcta |
| | | caacgaactcaatcttggtcggagagaggagtacgacgt |
| | | gctggacaagcggagaggacgggacccagaaatgggc |
| | | gggaagccgcgcagaaagaatccccaagagggcctgt |
| | | acaacgagctccaaaaggataagatggcagaagcctat |
| | | agcgagattggtatgaaaggggaacgcagaagaggca |
| | | aaggccacgacggactgtaccagggactcagcaccgcc |
| | | accaaggacacctatgacgctcttcacatgcaggccctgc |
| | | cgcctcgg (SEQ ID NO: 1069) |
| SP-Linker 3- | MALPVTALLLPLALLLHAARPD | atggccctccctgtcaccgccctgctgcttccgctggctcttc |
| ERmut1-Furin | SLALSLTADQMVSALLDAEPPI | tgctccacgccgctcggcccgatTcgttggcactttccctg |
| cleavage site 2- | LYSEYDPTRPFSEASMMGLLT | actgccgaccagatggtgtccgcccttctggacgccgagc |
| BCMA CAR | NLADRELVHMINWAKRVPGF | ctccaattctgtactcggagtacgatccgactcgcccgttct |
| | VDLALHDQVHLLECAWMEILM | ccgaagccagcatgatgggcctgttgactaacctggcgg |
| | IGLVWRSMEHPGKLLFAPNLL | accgcgagttggtgcacatgattaactgggctaagcgggt |
| | LDRNQGKCVEGGVEIFDMLLA | gccgggcttcgtggacctggccctgcacgaccaagtgca |
| | TSSRFRMMNLQGEEFVCLKSI | cctcctggaatgcgcctggatggaaatcctcatgatcggcc |
| | ILLNSGVYTFLSSTLKSLEEKD | tcgtgtggagatccatggagcatcccggaaagctcctgttt |
| | HIHRVLDKITDTLIHLMAKAGLT | gcacccaacctcctgcttgatcgcaaccagggaaaatgc |
| | LQQQHQRLAQLLLILSHIRHM | gtggaagggggtgtcgagattttcgacatgctgctcgccac |
| | SSKRMEHLYSMKCKNVVPLS | ctcttcccggttccggatgatgaatctgcagggagaagagt |
| | DLLLEMLDAHRLGTGAEDPRP | tcgtgtgtctgaagtcaatcatcctgctgaactccggggtct |
| | SRKRRSLGDVGEVQLVESGG | ataccttcctgagctcgaccctcaagtcactggaggaaaa |
| | GLVQPGGSLRLSCAVSGFALS | agaccacatccatcgcgtgctcgataagatcaccgacac |
| | NHGMSWVRRAPGKGLEWVS | ccttatccatctcatggcgaaggctggactgaccctgcaac |
| | GIVYSGSTYYAASVKGRFTISR | agcagcaccagaggctggcccagttgctgctgattctgag |
| | DNSRNTLYLQMNSLRPEDTAI | ccacatccggcacatgtcgtccaagaggatggaacacct |
| | YYCSAHGGESDVWGQGTTVT | gtacagcatgaagtgcaagaacgtcgtgcctctgtccgat |
| | VSSASGGGGSGGRASGGGG | ctgctcctggaaatgctggacgcgcacagactcggaacc |
| | SDIQLTQSPSSLSASVGDRVTI | ggcgcggaagacccccggccctccaggaagcgaaggt |
| | TCRASQSISSYLNWYQQKPG | ccctcggagacgtgggtgaagtgcaattggtggaatcag |
| | KAPKLLIYAASSLQSGVPSRFS | ggggaggacttgtgcagcctggaggatcgctgagactgtc |
| | GSGSGTDFTLTISSLQPEDFA | atgtgccgtgtccggctttgccctgtccaaccacgggatgtc |
| | TYYCQQSYSTPYTFGQGTKV | ctgggtccgccgcgcgcctggaaagggcctcgaatgggt |
| | EIKTTTPAPRPPTPAPTIASQP | gtcgggtattgtgtacagcggtagcacctactatgccgcat |
| | LSLRPEACRPAAGGAVHTRG | ccgtgaaggggagattcaccatcagccgggacaactcc |
| | LDFACDIYIWAPLAGTCGVLLL | aggaacactctgtacctccaaatgaattcgctgaggccag |
| | SLVITLYCKRGRKKLLYIFKQP | aggacactgccatctactactgctccgcgcatggcggaga |
| | FMRPVQTTQEEDGCSCRFPE | gtccgacgtctggggacaggggaccaccgtgaccgtgtc |
| | EEEGGCELRVKFSRSADAPA | tagcgcgtccggcggaggcggcagcgggggtcgggcat |
| | YQQGQNQLYNELNLGRREEY | cagggggcggcggatcggacatccagctcacccagtcc |
| | DVLDKRRGRDPEMGGKPRRK | ccgagctcgctgtccgcctccgtgggagatcgggtcacca |
| | NPQEGLYNELQKDKMAEAYS | tcacgtgccgcgccagccagtcgatttcctcctacctgaac |
| | EIGMKGERRRGKGHDGLYQG | tggtaccaacagaagcccggaaaagccccgaagcttctc |
| | LSTATKDTYDALHMQALPPR | atctacgccgcctcgagcctgcagtcaggagtgccctcac |
| | (SEQ ID NO: 1010) | ggttctccggctccggttccggtactgatttcaccctgaccat |
| | | ttcctccctgcaaccggaggacttcgctacttactactgcca |
| | | gcagtcgtactccaccccctacactttcggacaaggcacc |
| | | aaggtcgaaatcaagaccactaccccagcaccgaggcc |
| | | acccaccccggctcctaccatcgcctcccagcctctgtccc |
| | | tgcgtccggaggcatgtagacccgcagctggtggggccg |
| | | tgcatacccggggtcttgacttcgcctgcgatatctacatttg |
| | | ggcccctctggctggtacttgcggggtcctgctgctttcactc |
| | | gtgatcactctttactgtaagcgcggtcggaagaagctgct |
| | | gtacatctttaagcaacccttcatgaggcctgtgcagacta |
| | | ctcaagaggaggacggctgttcatgccggttcccagagg |
| | | aggaggaaggcggctgcgaactgcgcgtgaaattcagc |
| | | cgcagcgcagatgctccagcctaccagcaggggcagaa |
| | | ccagctctacaacgaactcaatcttggtcggagagagga |
| | | gtacgacgtgctggacaagcggagaggacgggaccca |
| | | gaaatgggcgggaagccgcgcagaaagaatccccaag |
| | | agggcctgtacaacgagctccaaaaggataagatggca |
| | | gaagcctatagcgagattggtatgaaaggggaacgcag |
| | | aagaggcaaaggccacgacggactgtaccagggactc |
| | | agcaccgccaccaaggacacctatgacgctcttcacatg |
| | | caggccctgccgcctcgg (SEQ ID NO: 1070) |
| SP-Linker 3- | MALPVTALLLPLALLLHAARPD | atggccctccctgtcaccgccctgctgcttccgctggctcttc |
| ERmut2-Furin | SLALSLTADQMVSALLDAEPPI | tgctccacgccgctcggcccgatTcgttggcactttccctg |
| cleavage site 2- | LYSEYDPTRPFSEASMMGLLT | actgccgaccagatggtgtccgcccttctggacgccgagc |
| BCMA CAR | NLADRELVHMINWAKRVPGF | ctccaattctgtactcggagtacgatccgactcgcccgttct |
| | VDLTLHDQVHLLECAWMEILM | ccgaagccagcatgatgggcctgttgactaacctggcgg |
| | IGLVWRSMEHPGKLLFAPNLL | accgcgagttggtgcacatgattaactgggctaagcgggt |
| | LDRNQGKCVEGGVEIFDMLLA | gccgggcttcgtggacctgaccctgcacgaccaagtgca |
| | TSSRFRMMNLQGEEFVCLKSI | cctcctggaatgcgcctggatggaaatcctcatgatcggcc |
| | ILLNSGVYTFLSSTLKSLEEKD | tcgtgtggagatccatggagcatcccggaaagctcctgttt |
| | HIHRVLDKITDTLIHLMAKAGLT | gcacccaacctcctgcttgatcgcaaccagggaaaatgc |
| | LQQQHQRLAQLLLILSHIRHM | gtggaagggggtgtcgagattttcgacatgctgctcgccac |
| | SNKRMEHLYSMKCKNVVPLS | ctcttcccggttccggatgatgaatctgcagggagaagagt |
| | DLLLEMLDAHRLGTGAEDPRP | tcgtgtgtctgaagtcaatcatcctgctgaactccggggtct |
| | SRKRRSLGDVGEVQLVESGG | ataccttcctgagctcgaccctcaagtcactggaggaaaa |
| | GLVQPGGSLRLSCAVSGFALS | agaccacatccatcgcgtgctcgataagatcaccgacac |
| | NHGMSWVRRAPGKGLEWVS | ccttatccatctcatggcgaaggctggactgaccctgcaac |
| | GIVYSGSTYYAASVKGRFTISR | agcagcaccagaggctggcccagttgctgctgattctgag |
| | DNSRNTLYLQMNSLRPEDTAI | ccacatccggcacatgtcgaacaagaggatggaacacc |
| | YYCSAHGGESDVWGQGTTVT | tgtacagcatgaagtgcaagaacgtcgtgcctctgtccgat |
| | VSSASGGGGSGGRASGGGG | ctgctcctggaaatgctggacgcgcacagactcggaacc |
| | SDIQLTQSPSSLSASVGDRVTI | ggcgcggaagacccccggccctccaggaagcgaaggt |
| | TCRASQSISSYLNWYQQKPG | ccctcggagacgtgggtgaagtgcaattggtggaatcag |
| | KAPKLLIYAASSLQSGVPSRFS | ggggaggacttgtgcagcctggaggatcgctgagactgtc |
| | GSGSGTDFTLTISSLQPEDFA | atgtgccgtgtccggctttgccctgtccaaccacgggatgtc |
| | TYYCQQSYSTPYTFGQGTKV | ctgggtccgccgcgcgcctggaaagggcctcgaatgggt |
| | EIKTTTPAPRPPTPAPTIASQP | gtcgggtattgtgtacagcggtagcacctactatgccgcat |
| | LSLRPEACRPAAGGAVHTRG | ccgtgaaggggagattcaccatcagccgggacaactcc |
| | LDFACDIYIWAPLAGTCGVLLL | aggaacactctgtacctccaaatgaattcgctgaggccag |
| | SLVITLYCKRGRKKLLYIFKQP | aggacactgccatctactactgctccgcgcatggcggaga |
| | FMRPVQTTQEEDGCSCRFPE | gtccgacgtctggggacaggggaccaccgtgaccgtgtc |
| | EEEGGCELRVKFSRSADAPA | tagcgcgtccggcggaggcggcagcgggggtcgggcat |
| | YQQGQNQLYNELNLGRREEY | cagggggcggcggatcggacatccagctcacccagtcc |
| | DVLDKRRGRDPEMGGKPRRK | ccgagctcgctgtccgcctccgtgggagatcgggtcacca |
| | NPQEGLYNELQKDKMAEAYS | tcacgtgccgcgccagccagtcgatttcctcctacctgaac |
| | EIGMKGERRRGKGHDGLYQG | tggtaccaacagaagcccggaaaagccccgaagcttctc |
| | LSTATKDTYDALHMQALPPR | atctacgccgcctcgagcctgcagtcaggagtgccctcac |
| | (SEQ ID NO: 1011) | ggttctccggctccggttccggtactgatttcaccctgaccat |
| | | ttcctccctgcaaccggaggacttcgctacttactactgcca |
| | | gcagtcgtactccaccccctacactttcggacaaggcacc |
| | | aaggtcgaaatcaagaccactaccccagcaccgaggcc |
| | | acccaccccggctcctaccatcgcctcccagcctctgtccc |
| | | tgcgtccggaggcatgtagacccgcagctggtggggccg |
| | | tgcatacccggggtcttgacttcgcctgcgatatctacatttg |
| | | ggcccctctggctggtacttgcggggtcctgctgctttcactc |
| | | gtgatcactctttactgtaagcgcggtcggaagaagctgct |
| | | gtacatctttaagcaacccttcatgaggcctgtgcagacta |
| | | ctcaagaggaggacggctgttcatgccggttcccagagg |
| | | aggaggaaggcggctgcgaactgcgcgtgaaattcagc |
| | | cgcagcgcagatgctccagcctaccagcaggggcagaa |
| | | ccagctctacaacgaactcaatcttggtcggagagagga |
| | | gtacgacgtgctggacaagcggagaggacgggaccca |
| | | gaaatgggcgggaagccgcgcagaaagaatccccaag |
| | | agggcctgtacaacgagctccaaaaggataagatggca |
| | | gaagcctatagcgagattggtatgaaaggggaacgcag |
| | | aagaggcaaaggccacgacggactgtaccagggactc |
| | | agcaccgccaccaaggacacctatgacgctcttcacatg |
| | | caggccctgccgcctcgg (SEQ ID NO: 1071) |
| SP-Linker 3- | MALPVTALLLPLALLLHAARPD | atggccctccctgtcaccgccctgctgcttccgctggctcttc |
| ERmut1-Furin | SLALSLTADQMVSALLDAEPPI | tgctccacgccgctcggcccgatTcgttggcactttccctg |
| cleavage site 3- | LYSEYDPTRPFSEASMMGLLT | actgccgaccagatggtgtccgcccttctggacgccgagc |
| BCMA CAR | NLADRELVHMINWAKRVPGF | ctccaattctgtactcggagtacgatccgactcgcccgttct |
| | VDLALHDQVHLLECAWMEILM | ccgaagccagcatgatgggcctgttgactaacctggcgg |
| | IGLVWRSMEHPGKLLFAPNLL | accgcgagttggtgcacatgattaactgggctaagcgggt |
| | LDRNQGKCVEGGVEIFDMLLA | gccgggcttcgtggacctggccctgcacgaccaagtgca |
| | TSSRFRMMNLOGEEFVCLKSI | cctcctggaatgcgcctggatggaaatcctcatgatcggcc |
| | ILLNSGVYTFLSSTLKSLEEKD | tcgtgtggagatccatggagcatcccggaaagctcctgttt |
| | HIHRVLDKITDTLIHLMAKAGLT | gcacccaacctcctgcttgatcgcaaccagggaaaatgc |
| | LQQQHQRLAQLLLILSHIRHM | gtggaagggggtgtcgagattttcgacatgctgctcgccac |
| | SSKRMEHLYSMKCKNVVPLS | ctcttcccggttccggatgatgaatctgcagggagaagagt |
| | DLLLEMLDAHRLGTGAEDPRP | tcgtgtgtctgaagtcaatcatcctgctgaactccggggtct |
| | SRKRREVQLVESGGGLVQPG | ataccttcctgagctcgaccctcaagtcactggaggaaaa |
| | GSLRLSCAVSGFALSNHGMS | agaccacatccatcgcgtgctcgataagatcaccgacac |
| | WVRRAPGKGLEWVSGIVYSG | ccttatccatctcatggcgaaggctggactgaccctgcaac |
| | STYYAASVKGRFTISRDNSRN | agcagcaccagaggctggcccagttgctgctgattctgag |
| | TLYLQMNSLRPEDTAIYYCSA | ccacatccggcacatgtcgtccaagaggatggaacacct |
| | HGGESDVWGQGTTVTVSSAS | gtacagcatgaagtgcaagaacgtcgtgcctctgtccgat |
| | GGGGSGGRASGGGGSDIQLT | ctgctcctggaaatgctggacgcgcacagactcGggacg |
| | QSPSSLSASVGDRVTITCRAS | ggagctgaagatccacgacccagcagaaagcgacggg |
| | QSISSYLNWYQQKPGKAPKLL | aagtgcaattggtggaatcagggggaggacttgtgcagc |
| | IYAASSLQSGVPSRFSGSGSG | ctggaggatcgctgagactgtcatgtgccgtgtccggctttg |
| | TDFTLTISSLQPEDFATYYCQ | ccctgtccaaccacgggatgtcctgggtccgccgcgcgcc |
| | QSYSTPYTFGQGTKVEIKTTT | tggaaagggcctcgaatgggtgtcgggtattgtgtacagc |
| | PAPRPPTPAPTIASQPLSLRPE | ggtagcacctactatgccgcatccgtgaaggggagattca |
| | ACRPAAGGAVHTRGLDFACDI | ccatcagccgggacaactccaggaacactctgtacctcc |
| | YIWAPLAGTCGVLLLSLVITLY | aaatgaattcgctgaggccagaggacactgccatctacta |
| | CKRGRKKLLYIFKQPFMRPVQ | ctgctccgcgcatggcggagagtccgacgtctggggaca |
| | TTQEEDGCSCRFPEEEEGGC | ggggaccaccgtgaccgtgtctagcgcgtccggcggag |
| | ELRVKFSRSADAPAYQQGQN | gcggcagcgggggtcgggcatcagggggcggcggatc |
| | QLYNELNLGRREEYDVLDKR | ggacatccagctcacccagtccccgagctcgctgtccgcc |
| | RGRDPEMGGKPRRKNPQEG | tccgtgggagatcgggtcaccatcacgtgccgcgccagc |
| | LYNELQKDKMAEAYSEIGMKG | cagtcgatttcctcctacctgaactggtaccaacagaagcc |
| | ERRRGKGHDGLYQGLSTATK | cggaaaagccccgaagcttctcatctacgccgcctcgag |
| | DTYDALHMQALPPR | cctgcagtcaggagtgccctcacggttctccggctccggtt |
| | (SEQ ID NO: 1012) | ccggtactgatttcaccctgaccatttcctccctgcaaccgg |
| | | aggacttcgctacttactactgccagcagtcgtactccacc |
| | | ccctacactttcggacaaggcaccaaggtcgaaatcaag |
| | | accactaccccagcaccgaggccacccaccccggctcct |
| | | accatcgcctcccagcctctgtccctgcgtccggaggcatg |
| | | tagacccgcagctggtggggccgtgcatacccggggtctt |
| | | gacttcgcctgcgatatctacatttgggcccctctggctggta |
| | | cttgcggggtcctgctgctttcactcgtgatcactctttactgta |
| | | agcgcggtcggaagaagctgctgtacatctttaagcaacc |
| | | cttcatgaggcctgtgcagactactcaagaggaggacgg |
| | | ctgttcatgccggttcccagaggaggaggaaggcggctg |
| | | cgaactgcgcgtgaaattcagccgcagcgcagatgctcc |
| | | agcctaccagcaggggcagaaccagctctacaacgaac |
| | | tcaatcttggtcggagagaggagtacgacgtgctggaca |
| | | agcggagaggacgggacccagaaatgggcgggaagc |
| | | cgcgcagaaagaatccccaagagggcctgtacaacga |
| | | gctccaaaaggataagatggcagaagcctatagcgaga |
| | | ttggtatgaaaggggaacgcagaagaggcaaaggcca |
| | | cgacggactgtaccagggactcagcaccgccaccaagg |
| | | acacctatgacgctcttcacatgcaggccctgccgcctcg |
| | | g (SEQ ID NO: 1072) |
| SP-Linker 3- | MALPVTALLLPLALLLHAARPD | atggccctccctgtcaccgccctgctgcttccgctggctcttc |
| ERmut2-Furin | SLALSLTADQMVSALLDAEPPI | tgctccacgccgctcggcccgatTcgttggcactttccctg |
| cleavage site 3 | LYSEYDPTRPFSEASMMGLLT | actgccgaccagatggtgtccgcccttctggacgccgagc |
| BCMA CAR | NLADRELVHMINWAKRVPGF | ctccaattctgtactcggagtacgatccgactcgcccgttct |
| | VDLTLHDQVHLLECAWMEILM | ccgaagccagcatgatgggcctgttgactaacctggcgg |
| | IGLVWRSMEHPGKLLFAPNLL | accgcgagttggtgcacatgattaactgggctaagcgggt |
| | LDRNQGKCVEGGVEIFDMLLA | gccgggcttcgtggacctgaccctgcacgaccaagtgca |
| | TSSRFRMMNLQGEEFVCLKSI | cctcctggaatgcgcctggatggaaatcctcatgatcggcc |
| | ILLNSGVYTFLSSTLKSLEEKD | tcgtgtggagatccatggagcatcccggaaagctcctgttt |
| | HIHRVLDKITDTLIHLMAKAGLT | gcacccaacctcctgcttgatcgcaaccagggaaaatgc |
| | LQQQHQRLAQLLLILSHIRHM | gtggaagggggtgtcgagattttcgacatgctgctcgccac |
| | SNKRMEHLYSMKCKNVVPLS | ctcttcccggttccggatgatgaatctgcagggagaagagt |
| | DLLLEMLDAHRLGTGAEDPRP | tcgtgtgtctgaagtcaatcatcctgctgaactccggggtct |
| | SRKRREVQLVESGGGLVQPG | ataccttcctgagctcgaccctcaagtcactggaggaaaa |
| | GSLRLSCAVSGFALSNHGMS | agaccacatccatcgcgtgctcgataagatcaccgacac |
| | WVRRAPGKGLEWVSGIVYSG | ccttatccatctcatggcgaaggctggactgaccctgcaac |
| | STYYAASVKGRFTISRDNSRN | agcagcaccagaggctggcccagttgctgctgattctgag |
| | TLYLQMNSLRPEDTAIYYCSA | ccacatccggcacatgtcgaacaagaggatggaacacc |
| | HGGESDVWGQGTTVTVSSAS | tgtacagcatgaagtgcaagaacgtcgtgcctctgtccgat |
| | GGGGSGGRASGGGGSDIQLT | ctgctcctggaaatgctggacgcgcacagactcgggacg |
| | QSPSSLSASVGDRVTITCRAS | ggagctgaagatccacgacccagcagaaagcgacggg |
| | QSISSYLNWYQQKPGKAPKLL | aagtgcaattggtggaatcagggggaggacttgtgcagc |
| | IYAASSLQSGVPSRFSGSGSG | ctggaggatcgctgagactgtcatgtgccgtgtccggctttg |
| | TDFTLTISSLQPEDFATYYCQ | ccctgtccaaccacgggatgtcctgggtccgccgcgcgcc |
| | QSYSTPYTFGQGTKVEIKTTT | tggaaagggcctcgaatgggtgtcgggtattgtgtacagc |
| | PAPRPPTPAPTIASQPLSLRPE | ggtagcacctactatgccgcatccgtgaaggggagattca |
| | ACRPAAGGAVHTRGLDFACDI | ccatcagccgggacaactccaggaacactctgtacctcc |
| | YIWAPLAGTCGVLLLSLVITLY | aaatgaattcgctgaggccagaggacactgccatctacta |
| | CKRGRKKLLYIFKQPFMRPVQ | ctgctccgcgcatggcggagagtccgacgtctggggaca |
| | TTQEEDGCSCRFPEEEEGGC | ggggaccaccgtgaccgtgtctagcgcgtccggcggag |
| | ELRVKFSRSADAPAYQQGQN | gcggcagcgggggtcgggcatcagggggcggcggatc |
| | QLYNELNLGRREEYDVLDKR | ggacatccagctcacccagtccccgagctcgctgtccgcc |
| | RGRDPEMGGKPRRKNPQEG | tccgtgggagatcgggtcaccatcacgtgccgcgccagc |
| | LYNELQKDKMAEAYSEIGMKG | cagtcgatttcctcctacctgaactggtaccaacagaagcc |
| | ERRRGKGHDGLYQGLSTATK | cggaaaagccccgaagcttctcatctacgccgcctcgag |
| | DTYDALHMQALPPR | cctgcagtcaggagtgccctcacggttctccggctccggtt |
| | (SEQ ID NO: 1013) | ccggtactgatttcaccctgaccatttcctccctgcaaccgg |
| | | aggacttcgctacttactactgccagcagtcgtactccacc |
| | | ccctacactttcggacaaggcaccaaggtcgaaatcaag |
| | | accactaccccagcaccgaggccacccaccccggctcct |
| | | accatcgcctcccagcctctgtccctgcgtccggaggcatg |
| | | tagacccgcagctggtggggccgtgcatacccggggtctt |
| | | gacttcgcctgcgatatctacatttgggcccctctggctggta |
| | | cttgcggggtcctgctgctttcactcgtgatcactctttactgta |
| | | agcgcggtcggaagaagctgctgtacatctttaagcaacc |
| | | cttcatgaggcctgtgcagactactcaagaggaggacgg |
| | | ctgttcatgccggttcccagaggaggaggaaggcggctg |
| | | cgaactgcgcgtgaaattcagccgcagcgcagatgctcc |
| | | agcctaccagcaggggcagaaccagctctacaacgaac |
| | | tcaatcttggtcggagagaggagtacgacgtgctggaca |
| | | agcggagaggacgggacccagaaatgggcgggaagc |
| | | cgcgcagaaagaatccccaagagggcctgtacaacga |
| | | gctccaaaaggataagatggcagaagcctatagcgaga |
| | | ttggtatgaaaggggaacgcagaagaggcaaaggcca |
| | | cgacggactgtaccagggactcagcaccgccaccaagg |
| | | acacctatgacgctcttcacatgcaggccctgccgcctcg |
| | | g (SEQ ID NO: 1073) |
| SP-Linker 4- | MALPVTALLLPLALLLHAARPN | atggccctccctgtcaccgccctgctgcttccgctggctcttc |
| ERmut1-Furin | SLALSLTADQMVSALLDAEPPI | tgctccacgccgctcggcccaactcgttggcactttccctga |
| cleavage site 2- | LYSEYDPTRPFSEASMMGLLT | ctgccgaccagatggtgtccgcccttctggacgccgagcc |
| CD19 CAR2 | NLADRELVHMINWAKRVPGF | tccaattctgtactcggagtacgatccgactcgcccgttctc |
| | VDLALHDQVHLLECAWMEILM | cgaagccagcatgatgggcctgttgactaacctggcgga |
| | IGLVWRSMEHPGKLLFAPNLL | ccgcgagttggtgcacatgattaactgggctaagcgggtg |
| | LDRNQGKCVEGGVEIFDMLLA | ccgggcttcgtggacctggccctgcacgaccaagtgcac |
| | TSSRFRMMNLQGEEFVCLKSI | ctcctggaatgcgcctggatggaaatcctcatgatcggcct |
| | ILLNSGVYTFLSSTLKSLEEKD | cgtgtggagatccatggagcatcccggaaagctcctgtttg |
| | HIHRVLDKITDTLIHLMAKAGLT | cacccaacctcctgcttgatcgcaaccagggaaaatgcgt |
| | LQQQHQRLAQLLLILSHIRHM | ggaagggggtgtcgagattttcgacatgctgctcgccacct |
| | SSKRMEHLYSMKCKNVVPLS | cttcccggttccggatgatgaatctgcagggagaagagttc |
| | DLLLEMLDAHRLGTGAEDPRP | gtgtgtctgaagtcaatcatcctgctgaactccggggtctat |
| | SRKRRSLGDVGEIVMTQSPAT | accttcctgagctcgaccctcaagtcactggaggaaaaa |
| | LSLSPGERATLSCRASQDISK | gaccacatccatcgcgtgctcgataagatcaccgacacc |
| | YLNWYQQKPGQAPRLLIYHTS | cttatccatctcatggcgaaggctggactgaccctgcaaca |
| | RLHSGIPARFSGSGSGTDYTL | gcagcaccagaggctggcccagttgctgctgattctgagc |
| | TISSLQPEDFAVYFCQQGNTL | cacatccggcacatgtcgtccaagaggatggaacacctg |
| | PYTFGQGTKLEIKGGGGSGG | tacagcatgaagtgcaagaacgtcgtgcctctgtccgatct |
| | GGSGGGGSQVQLQESGPGL | gctcctggaaatgctggacgcgcacagactcggaaccg |
| | VKPSETLSLTCTVSGVSLPDY | gcgcggaagacccccggccctccaggaagcgaaggtc |
| | GVSWIRQPPGKGLEWIGVIW | cctcggagacgtgggtgaaattgtgatgacccagtcaccc |
| | GSETTYYSSSLKSRVTISKDN | gccactcttagcctttcacccggtgagcgcgcaaccctgtc |
| | SKNQVSLKLSSVTAADTAVYY | ttgcagagcctcccaagacatctcaaaataccttaattggt |
| | CAKHYYYGGSYAMDYWGQG | atcaacagaagcccggacaggctcctcgccttctgatcta |
| | TLVTVSSTTTPAPRPPTPAPTI | ccacaccagccggctccattctggaatccctgccaggttc |
| | ASQPLSLRPEACRPAAGGAV | agcggtagcggatctgggaccgactacaccctcactatca |
| | HTRGLDFACDIYIWAPLAGTC | gctcactgcagccagaggacttcgctgtctatttctgtcagc |
| | GVLLLSLVITLYCKRGRKKLLYI | aagggaacaccctgccctacacctttggacagggcacca |
| | FKQPFMRPVQTTQEEDGCSC | agctcgagattaaaggtggaggtggcagcggaggaggt |
| | RFPEEEEGGCELRVKFSRSA | gggtccggcggtggaggaagccaggtccaactccaaga |
| | DAPAYQQGQNQLYNELNLGR | aagcggaccgggtcttgtgaagccatcagaaactctttca |
| | REEYDVLDKRRGRDPEMGGK | ctgacttgtactgtgagcggagtgtctctccccgattacggg |
| | PRRKNPQEGLYNELQKDKMA | gtgtcttggatcagacagccaccggggaagggtctggaat |
| | EAYSEIGMKGERRRGKGHDG | ggattggagtgatttggggctctgagactacttactactcttc |
| | LYQGLSTATKDTYDALHMQAL | atccctcaagtcacgcgtcaccatctcaaaggacaactct |
| | PPR (SEQ ID NO: 1014) | aagaatcaggtgtcactgaaactgtcatctgtgaccgcag |
| | | ccgacaccgccgtgtactattgcgctaagcattactattatg |
| | | gcgggagctacgcaatggattactggggacagggtactct |
| | | ggtcaccgtgtccagcaccactaccccagcaccgaggcc |
| | | acccaccccggctcctaccatcgcctcccagcctctgtccc |
| | | tgcgtccggaggcatgtagacccgcagctggtggggccg |
| | | tgcatacccggggtcttgacttcgcctgcgatatctacatttg |
| | | ggcccctctggctggtacttgcggggtcctgctgctttcactc |
| | | gtgatcactctttactgtaagcgcggtcggaagaagctgct |
| | | gtacatctttaagcaacccttcatgaggcctgtgcagacta |
| | | ctcaagaggaggacggctgttcatgccggttcccagagg |
| | | aggaggaaggcggctgcgaactgcgcgtgaaattcagc |
| | | cgcagcgcagatgctccagcctaccagcaggggcagaa |
| | | ccagctctacaacgaactcaatcttggtcggagagagga |
| | | gtacgacgtgctggacaagcggagaggacgggaccca |
| | | gaaatgggcgggaagccgcgcagaaagaatccccaag |
| | | agggcctgtacaacgagctccaaaaggataagatggca |
| | | gaagcctatagcgagattggtatgaaaggggaacgcag |
| | | aagaggcaaaggccacgacggactgtaccagggactc |
| | | agcaccgccaccaaggacacctatgacgctcttcacatg |
| | | caggccctgccgcctcgg (SEQ ID NO: 1074) |
| SP-Linker 4- | MALPVTALLLPLALLLHAARPN | atggccctccctgtcaccgccctgctgcttccgctggctcttc |
| ERmut2-Furin | SLALSLTADQMVSALLDAEPPI | tgctccacgccgctcggcccaactcgttggcactttccctga |
| cleavage site 2- | LYSEYDPTRPFSEASMMGLLT | ctgccgaccagatggtgtccgcccttctggacgccgagcc |
| CD19 CAR2 | NLADRELVHMINWAKRVPGF | tccaattctgtactcggagtacgatccgactcgcccgttctc |
| | VDLTLHDQVHLLECAWMEILM | cgaagccagcatgatgggcctgttgactaacctggcgga |
| | IGLVWRSMEHPGKLLFAPNLL | ccgcgagttggtgcacatgattaactgggctaagcgggtg |
| | LDRNQGKCVEGGVEIFDMLLA | ccgggcttcgtggacctgaccctgcacgaccaagtgcac |
| | TSSRFRMMNLQGEEFVCLKSI | ctcctggaatgcgcctggatggaaatcctcatgatcggcct |
| | ILLNSGVYTFLSSTLKSLEEKD | cgtgtggagatccatggagcatcccggaaagctcctgtttg |
| | HIHRVLDKITDTLIHLMAKAGLT | cacccaacctcctgcttgatcgcaaccagggaaaatgcgt |
| | LQQQHQRLAQLLLILSHIRHM | ggaagggggtgtcgagattttcgacatgctgctcgccacct |
| | SNKRMEHLYSMKCKNVVPLS | cttcccggttccggatgatgaatctgcagggagaagagttc |
| | DLLLEMLDAHRLGTGAEDPRP | gtgtgtctgaagtcaatcatcctgctgaactccggggtctat |
| | SRKRRSLGDVGEIVMTQSPAT | accttcctgagctcgaccctcaagtcactggaggaaaaa |
| | LSLSPGERATLSCRASQDISK | gaccacatccatcgcgtgctcgataagatcaccgacacc |
| | YLNWYQQKPGQAPRLLIYHTS | cttatccatctcatggcgaaggctggactgaccctgcaaca |
| | RLHSGIPARFSGSGSGTDYTL | gcagcaccagaggctggcccagttgctgctgattctgagc |
| | TISSLQPEDFAVYFCQQGNTL | cacatccggcacatgtcgaacaagaggatggaacacct |
| | PYTFGQGTKLEIKGGGGSGG | gtacagcatgaagtgcaagaacgtcgtgcctctgtccgat |
| | GGSGGGGSQVQLQESGPGL | ctgctcctggaaatgctggacgcgcacagactcggaacc |
| | VKPSETLSLTCTVSGVSLPDY | ggcgcggaagacccccggccctccaggaagcgaaggt |
| | GVSWIRQPPGKGLEWIGVIW | ccctcggagacgtgggtgaaattgtgatgacccagtcacc |
| | GSETTYYSSSLKSRVTISKDN | cgccactcttagcctttcacccggtgagcgcgcaaccctgt |
| | SKNQVSLKLSSVTAADTAVYY | cttgcagagcctcccaagacatctcaaaataccttaattgg |
| | CAKHYYYGGSYAMDYWGQG | tatcaacagaagcccggacaggctcctcgccttctgatcta |
| | TLVTVSSTTTPAPRPPTPAPTI | ccacaccagccggctccattctggaatccctgccaggttc |
| | ASQPLSLRPEACRPAAGGAV | agcggtagcggatctgggaccgactacaccctcactatca |
| | HTRGLDFACDIYIWAPLAGTC | gctcactgcagccagaggacttcgctgtctatttctgtcagc |
| | GVLLLSLVITLYCKRGRKKLLYI | aagggaacaccctgccctacacctttggacagggcacca |
| | FKQPFMRPVQTTQEEDGCSC | agctcgagattaaaggtggaggtggcagcggaggaggt |
| | RFPEEEEGGCELRVKFSRSA | gggtccggcggtggaggaagccaggtccaactccaaga |
| | DAPAYQQGQNQLYNELNLGR | aagcggaccgggtcttgtgaagccatcagaaactctttca |
| | REEYDVLDKRRGRDPEMGGK | ctgacttgtactgtgagcggagtgtctctccccgattacggg |
| | PRRKNPQEGLYNELQKDKMA | gtgtcttggatcagacagccaccggggaagggtctggaat |
| | EAYSEIGMKGERRRGKGHDG | ggattggagtgatttggggctctgagactacttactactcttc |
| | LYQGLSTATKDTYDALHMQAL | atccctcaagtcacgcgtcaccatctcaaaggacaactct |
| | PPR (SEQ ID NO: 1015) | aagaatcaggtgtcactgaaactgtcatctgtgaccgcag |
| | | ccgacaccgccgtgtactattgcgctaagcattactattatg |
| | | gcgggagctacgcaatggattactggggacagggtactct |
| | | ggtcaccgtgtccagcaccactaccccagcaccgaggcc |
| | | acccaccccggctcctaccatcgcctcccagcctctgtccc |
| | | tgcgtccggaggcatgtagacccgcagctggtggggccg |
| | | tgcatacccggggtcttgacttcgcctgcgatatctacatttg |
| | | ggcccctctggctggtacttgcggggtcctgctgctttcactc |
| | | gtgatcactctttactgtaagcgcggtcggaagaagctgct |
| | | gtacatctttaagcaacccttcatgaggcctgtgcagacta |
| | | ctcaagaggaggacggctgttcatgccggttcccagagg |
| | | aggaggaaggcggctgcgaactgcgcgtgaaattcagc |
| | | cgcagcgcagatgctccagcctaccagcaggggcagaa |
| | | ccagctctacaacgaactcaatcttggtcggagagagga |
| | | gtacgacgtgctggacaagcggagaggacgggaccca |
| | | gaaatgggcgggaagccgcgcagaaagaatccccaag |
| | | agggcctgtacaacgagctccaaaaggataagatggca |
| | | gaagcctatagcgagattggtatgaaaggggaacgcag |
| | | aagaggcaaaggccacgacggactgtaccagggactc |
| | | agcaccgccaccaaggacacctatgacgctcttcacatg |
| | | caggccctgccgcctcgg (SEQ ID NO: 1075) |
| SP-Linker 4- | MALPVTALLLPLALLLHAARPN | atggccctccctgtcaccgccctgctgcttccgctggctcttc |
| ERmut1-Furin | SLALSLTADQMVSALLDAEPPI | tgctccacgccgctcggcccaactcgttggcactttccctga |
| cleavage site 3- | LYSEYDPTRPFSEASMMGLLT | ctgccgaccagatggtgtccgcccttctggacgccgagcc |
| CD19 CAR2 | NLADRELVHMINWAKRVPGF | tccaattctgtactcggagtacgatccgactcgcccgttctc |
| | VDLALHDQVHLLECAWMEILM | cgaagccagcatgatgggcctgttgactaacctggcgga |
| | IGLVWRSMEHPGKLLFAPNLL | ccgcgagttggtgcacatgattaactgggctaagcgggtg |
| | LDRNQGKCVEGGVEIFDMLLA | ccgggcttcgtggacctggccctgcacgaccaagtgcac |
| | TSSRFRMMNLQGEEFVCLKSI | ctcctggaatgcgcctggatggaaatcctcatgatcggcct |
| | ILLNSGVYTFLSSTLKSLEEKD | cgtgtggagatccatggagcatcccggaaagctcctgtttg |
| | HIHRVLDKITDTLIHLMAKAGLT | cacccaacctcctgcttgatcgcaaccagggaaaatgcgt |
| | LQQQHQRLAQLLLILSHIRHM | ggaagggggtgtcgagattttcgacatgctgctcgccacct |
| | SSKRMEHLYSMKCKNVVPLS | cttcccggttccggatgatgaatctgcagggagaagagttc |
| | DLLLEMLDAHRLGTGAEDPRP | gtgtgtctgaagtcaatcatcctgctgaactccggggtctat |
| | SRKRREIVMTQSPATLSLSPG | accttcctgagctcgaccctcaagtcactggaggaaaaa |
| | ERATLSCRASQDISKYLNWYQ | gaccacatccatcgcgtgctcgataagatcaccgacacc |
| | QKPGQAPRLLIYHTSRLHSGIP | cttatccatctcatggcgaaggctggactgaccctgcaaca |
| | ARFSGSGSGTDYTLTISSLQP | gcagcaccagaggctggcccagttgctgctgattctgagc |
| | EDFAVYFCQQGNTLPYTFGQ | cacatccggcacatgtcgtccaagaggatggaacacctg |
| | GTKLEIKGGGGSGGGGSGGG | tacagcatgaagtgcaagaacgtcgtgcctctgtccgatct |
| | GSQVQLQESGPGLVKPSETL | gctcctggaaatgctggacgcgcacagactcgggacgg |
| | SLTCTVSGVSLPDYGVSWIRQ | gagctgaagatccacgacccagcagaaagcgacggga |
| | PPGKGLEWIGVIWGSETTYYS | aattgtgatgacccagtcacccgccactcttagcctttcacc |
| | SSLKSRVTISKDNSKNQVSLK | cggtgagcgcgcaaccctgtcttgcagagcctcccaaga |
| | LSSVTAADTAVYYCAKHYYYG | catctcaaaataccttaattggtatcaacagaagcccgga |
| | GSYAMDYWGQGTLVTVSSTT | caggctcctcgccttctgatctaccacaccagccggctcca |
| | TPAPRPPTPAPTIASQPLSLRP | ttctggaatccctgccaggttcagcggtagcggatctggga |
| | EACRPAAGGAVHTRGLDFAC | ccgactacaccctcactatcagctcactgcagccagagg |
| | DIYIWAPLAGTCGVLLLSLVITL | acttcgctgtctatttctgtcagcaagggaacaccctgccct |
| | YCKRGRKKLLYIFKQPFMRPV | acacctttggacagggcaccaagctcgagattaaaggtg |
| | QTTQEEDGCSCRFPEEEEGG | gaggtggcagcggaggaggtgggtccggcggtggagg |
| | CELRVKFSRSADAPAYQQGQ | aagccaggtccaactccaagaaagcggaccgggtcttgt |
| | NQLYNELNLGRREEYDVLDK | gaagccatcagaaactctttcactgacttgtactgtgagcg |
| | RRGRDPEMGGKPRRKNPQE | gagtgtctctccccgattacggggtgtcttggatcagacag |
| | GLYNELQKDKMAEAYSEIGMK | ccaccggggaagggtctggaatggattggagtgatttggg |
| | GERRRGKGHDGLYQGLSTAT | gctctgagactacttactactcttcatccctcaagtcacgcgt |
| | KDTYDALHMQALPPR | caccatctcaaaggacaactctaagaatcaggtgtcactg |
| | (SEQ ID NO: 1016) | aaactgtcatctgtgaccgcagccgacaccgccgtgtact |
| | | attgcgctaagcattactattatggcgggagctacgcaatg |
| | | gattactggggacagggtactctggtcaccgtgtccagca |
| | | ccactaccccagcaccgaggccacccaccccggctccta |
| | | ccatcgcctcccagcctctgtccctgcgtccggaggcatgt |
| | | agacccgcagctggtggggccgtgcatacccggggtctt |
| | | gacttcgcctgcgatatctacatttgggcccctctggctggta |
| | | cttgcggggtcctgctgctttcactcgtgatcactctttactgta |
| | | agcgcggtcggaagaagctgctgtacatctttaagcaacc |
| | | cttcatgaggcctgtgcagactactcaagaggaggacgg |
| | | ctgttcatgccggttcccagaggaggaggaaggcggctg |
| | | cgaactgcgcgtgaaattcagccgcagcgcagatgctcc |
| | | agcctaccagcaggggcagaaccagctctacaacgaac |
| | | tcaatcttggtcggagagaggagtacgacgtgctggaca |
| | | agcggagaggacgggacccagaaatgggcgggaagc |
| | | cgcgcagaaagaatccccaagagggcctgtacaacga |
| | | gctccaaaaggataagatggcagaagcctatagcgaga |
| | | ttggtatgaaaggggaacgcagaagaggcaaaggcca |
| | | cgacggactgtaccagggactcagcaccgccaccaagg |
| | | acacctatgacgctcttcacatgcaggccctgccgcctcg |
| | | g (SEQ ID NO: 1076) |
| SP-Linker 4- | MALPVTALLLPLALLLHAARPN | atggccctccctgtcaccgccctgctgcttccgctggctcttc |
| ERmut2-Furin | SLALSLTADQMVSALLDAEPPI | tgctccacgccgctcggcccaacTcgttggcactttccctg |
| cleavage site 3- | LYSEYDPTRPFSEASMMGLLT | actgccgaccagatggtgtccgcccttctggacgccgagc |
| CD19 CAR2 | NLADRELVHMINWAKRVPGF | ctccaattctgtactcggagtacgatccgactcgcccgttct |
| | VDLTLHDQVHLLECAWMEILM | ccgaagccagcatgatgggcctgttgactaacctggcgg |
| | IGLVWRSMEHPGKLLFAPNLL | accgcgagttggtgcacatgattaactgggctaagcgggt |
| | LDRNQGKCVEGGVEIFDMLLA | gccgggcttcgtggacctgaccctgcacgaccaagtgca |
| | TSSRFRMMNLQGEEFVCLKSI | cctcctggaatgcgcctggatggaaatcctcatgatcggcc |
| | ILLNSGVYTFLSSTLKSLEEKD | tcgtgtggagatccatggagcatcccggaaagctcctgttt |
| | HIHRVLDKITDTLIHLMAKAGLT | gcacccaacctcctgcttgatcgcaaccagggaaaatgc |
| | LQQQHQRLAQLLLILSHIRHM | gtggaagggggtgtcgagattttcgacatgctgctcgccac |
| | SNKRMEHLYSMKCKNVVPLS | ctcttcccggttccggatgatgaatctgcagggagaagagt |
| | DLLLEMLDAHRLGTGAEDPRP | tcgtgtgtctgaagtcaatcatcctgctgaactccggggtct |
| | SRKRREIVMTQSPATLSLSPG | ataccttcctgagctcgaccctcaagtcactggaggaaaa |
| | ERATLSCRASQDISKYLNWYQ | agaccacatccatcgcgtgctcgataagatcaccgacac |
| | QKPGQAPRLLIYHTSRLHSGIP | ccttatccatctcatggcgaaggctggactgaccctgcaac |
| | ARFSGSGSGTDYTLTISSLQP | agcagcaccagaggctggcccagttgctgctgattctgag |
| | EDFAVYFCQQGNTLPYTFGQ | ccacatccggcacatgtcgaacaagaggatggaacacc |
| | GTKLEIKGGGGSGGGGSGGG | tgtacagcatgaagtgcaagaacgtcgtgcctctgtccgat |
| | GSQVQLQESGPGLVKPSETL | ctgctcctggaaatgctggacgcgcacagactcGggacg |
| | SLTCTVSGVSLPDYGVSWIRQ | ggagctgaagatccacgacccagcagaaagcgacggg |
| | PPGKGLEWIGVIWGSETTYYS | aaattgtgatgacccagtcacccgccactcttagcctttcac |
| | SSLKSRVTISKDNSKNQVSLK | ccggtgagcgcgcaaccctgtcttgcagagcctcccaag |
| | LSSVTAADTAVYYCAKHYYYG | acatctcaaaataccttaattggtatcaacagaagcccgg |
| | GSYAMDYWGQGTLVTVSSTT | acaggctcctcgccttctgatctaccacaccagccggctcc |
| | TPAPRPPTPAPTIASQPLSLRP | attctggaatccctgccaggttcagcggtagcggatctggg |
| | EACRPAAGGAVHTRGLDFAC | accgactacaccctcactatcagctcactgcagccagag |
| | DIYIWAPLAGTCGVLLLSLVITL | gacttcgctgtctatttctgtcagcaagggaacaccctgccc |
| | YCKRGRKKLLYIFKQPFMRPV | tacacctttggacagggcaccaagctcgagattaaaggtg |
| | QTTQEEDGCSCRFPEEEEGG | gaggtggcagcggaggaggtgggtccggcggtggagg |
| | CELRVKFSRSADAPAYQQGQ | aagccaggtccaactccaagaaagcggaccgggtcttgt |
| | NQLYNELNLGRREEYDVLDK | gaagccatcagaaactctttcactgacttgtactgtgagcg |
| | RRGRDPEMGGKPRRKNPQE | gagtgtctctccccgattacggggtgtcttggatcagacag |
| | GLYNELQKDKMAEAYSEIGMK | ccaccggggaagggtctggaatggattggagtgatttggg |
| | GERRRGKGHDGLYQGLSTAT | gctctgagactacttactactcttcatccctcaagtcacgcgt |
| | KDTYDALHMQALPPR | caccatctcaaaggacaactctaagaatcaggtgtcactg |
| | (SEQ ID NO: 1017) | aaactgtcatctgtgaccgcagccgacaccgccgtgtact |
| | | attgcgctaagcattactattatggcgggagctacgcaatg |
| | | gattactggggacagggtactctggtcaccgtgtccagca |
| | | ccactaccccagcaccgaggccacccaccccggctccta |
| | | ccatcgcctcccagcctctgtccctgcgtccggaggcatgt |
| | | agacccgcagctggtggggccgtgcatacccggggtctt |
| | | gacttcgcctgcgatatctacatttgggcccctctggctggta |
| | | cttgcggggtcctgctgctttcactcgtgatcactctttactgta |
| | | agcgcggtcggaagaagctgctgtacatctttaagcaacc |
| | | cttcatgaggcctgtgcagactactcaagaggaggacgg |
| | | ctgttcatgccggttcccagaggaggaggaaggcggctg |
| | | cgaactgcgcgtgaaattcagccgcagcgcagatgctcc |
| | | agcctaccagcaggggcagaaccagctctacaacgaac |
| | | tcaatcttggtcggagagaggagtacgacgtgctggaca |
| | | agcggagaggacgggacccagaaatgggcgggaagc |
| | | cgcgcagaaagaatccccaagagggcctgtacaacga |
| | | gctccaaaaggataagatggcagaagcctatagcgaga |
| | | ttggtatgaaaggggaacgcagaagaggcaaaggcca |
| | | cgacggactgtaccagggactcagcaccgccaccaagg |
| | | acacctatgacgctcttcacatgcaggccctgccgcctcg |
| | | g (SEQ ID NO: 1077) |
| SP-Linker 4- | MALPVTALLLPLALLLHAARPN | atggccctccctgtcaccgccctgctgcttccgctggctcttc |
| ERmut1-Furin | SLALSLTADQMVSALLDAEPPI | tgctccacgccgctcggcccaactcgttggcactttccctga |
| cleavage site 2- | LYSEYDPTRPFSEASMMGLLT | ctgccgaccagatggtgtccgcccttctggacgccgagcc |
| CD123 CAR | NLADRELVHMINWAKRVPGF | tccaattctgtactcggagtacgatccgactcgcccgttctc |
| | VDLALHDQVHLLECAWMEILM | cgaagccagcatgatgggcctgttgactaacctggcgga |
| | IGLVWRSMEHPGKLLFAPNLL | ccgcgagttggtgcacatgattaactgggctaagcgggtg |
| | LDRNQGKCVEGGVEIFDMLLA | ccgggcttcgtggacctggccctgcacgaccaagtgcac |
| | TSSRFRMMNLQGEEFVCLKSI | ctcctggaatgcgcctggatggaaatcctcatgatcggcct |
| | ILLNSGVYTFLSSTLKSLEEKD | cgtgtggagatccatggagcatcccggaaagctcctgtttg |
| | HIHRVLDKITDTLIHLMAKAGLT | cacccaacctcctgcttgatcgcaaccagggaaaatgcgt |
| | LQQQHQRLAQLLLILSHIRHM | ggaagggggtgtcgagattttcgacatgctgctcgccacct |
| | SSKRMEHLYSMKCKNVVPLS | cttcccggttccggatgatgaatctgcagggagaagagttc |
| | DLLLEMLDAHRLGTGAEDPRP | gtgtgtctgaagtcaatcatcctgctgaactccggggtctat |
| | SRKRRSLGDVGQVQLVQSGA | accttcctgagctcgaccctcaagtcactggaggaaaaa |
| | EVKKPGASVKVSCKASGYTFT | gaccacatccatcgcgtgctcgataagatcaccgacacc |
| | GYYMHWVRQAPGQGLEWM | cttatccatctcatggcgaaggctggactgaccctgcaaca |
| | GWINPNSGGTNYAQKFQGRV | gcagcaccagaggctggcccagttgctgctgattctgagc |
| | TLTRDTSISTVYMELSRLRSD | cacatccggcacatgtcgtccaagaggatggaacacctg |
| | DTAVYYCARDMNILATVPFDI | tacagcatgaagtgcaagaacgtcgtgcctctgtccgatct |
| | WGQGTMVTVSSGGGGSGGG | gctcctggaaatgctggacgcgcacagactcggaaccg |
| | GSGGGGSDIQMTQSPSSLSA | gcgcggaagacccccggccctccaggaagcgaaggtc |
| | SVGDRVTITCRASQSISSYLN | cctcggagacgtgggtcaagtgcaactcgtccaaagcgg |
| | WYQQKPGKAPKLLIYAASSLQ | agcggaagtcaagaaacccggagcgagcgtgaaagtg |
| | SGVPSRFSGSGSGTDFTLTV | tcctgcaaagcctccggctacacctttacgggctactacat |
| | NSLQPEDFATYYCQQGDSVP | gcactgggtgcgccaggcaccaggacagggtcttgaatg |
| | LTFGGGTRLEIKTTTPAPRPPT | gatgggatggatcaaccctaattcgggcggaactaactac |
| | PAPTIASQPLSLRPEACRPAA | gcacagaagttccaggggagagtgactctgactcgggat |
| | GGAVHTRGLDFACDIYIWAPL | acctccatctcaactgtctacatggaactctcccgcttgcgg |
| | AGTCGVLLLSLVITLYCKRGRK | tcagatgatacggcagtgtactactgcgcccgcgacatga |
| | KLLYIFKQPFMRPVQTTQEED | atatcctggctaccgtgccgttcgacatctggggacaggg |
| | GCSCRFPEEEEGGCELRVKF | gactatggttactgtctcatcgggcggtggaggttcaggag |
| | SRSADAPAYQQGQNQLYNEL | gaggcggctcgggaggcggaggttcggacattcagatg |
| | NLGRREEYDVLDKRRGRDPE | acccagtccccatcctctctgtcggccagcgtcggagata |
| | MGGKPRRKNPQEGLYNELQK | gggtgaccattacctgtcgggcctcgcaaagcatctcctcg |
| | DKMAEAYSEIGMKGERRRGK | tacctcaactggtatcagcaaaagccgggaaaggcgcct |
| | GHDGLYQGLSTATKDTYDAL | aagctgctgatctacgccgcttcgagcttgcaaagcgggg |
| | HMQALPPR (SEQ ID NO: | tgccatccagattctcgggatcaggctcaggaaccgacttc |
| | 1018) | accctgaccgtgaacagcctccagccggaggactttgcc |
| | | acttactactgccagcagggagactccgtgccgcttactttc |
| | | ggggggggtacccgcctggagatcaagaccactacccc |
| | | agcaccgaggccacccaccccggctcctaccatcgcctc |
| | | ccagcctctgtccctgcgtccggaggcatgtagacccgca |
| | | gctggtggggccgtgcatacccggggtcttgacttcgcctg |
| | | cgatatctacatttgggcccctctggctggtacttgcggggt |
| | | cctgctgctttcactcgtgatcactctttactgtaagcgcggtc |
| | | ggaagaagctgctgtacatctttaagcaacccttcatgagg |
| | | cctgtgcagactactcaagaggaggacggctgttcatgcc |
| | | ggttcccagaggaggaggaaggcggctgcgaactgcgc |
| | | gtgaaattcagccgcagcgcagatgctccagcctaccag |
| | | caggggcagaaccagctctacaacgaactcaatcttggt |
| | | cggagagaggagtacgacgtgctggacaagcggagag |
| | | gacgggacccagaaatgggcgggaagccgcgcagaa |
| | | agaatccccaagagggcctgtacaacgagctccaaaag |
| | | gataagatggcagaagcctatagcgagattggtatgaaa |
| | | ggggaacgcagaagaggcaaaggccacgacggactgt |
| | | accagggactcagcaccgccaccaaggacacctatgac |
| | | gctcttcacatgcaggccctgccgcctcgg (SEQ ID NO: 1078) |
| SP-Linker 4- | MALPVTALLLPLALLLHAARPN | atggccctccctgtcaccgccctgctgcttccgctggctcttc |
| ERmut2-Furin | SLALSLTADQMVSALLDAEPPI | tgctccacgccgctcggcccaacTcgttggcactttccctg |
| cleavage site 2- | LYSEYDPTRPFSEASMMGLLT | actgccgaccagatggtgtccgcccttctggacgccgagc |
| CD123 CAR | NLADRELVHMINWAKRVPGF | ctccaattctgtactcggagtacgatccgactcgcccgttct |
| | VDLTLHDQVHLLECAWMEILM | ccgaagccagcatgatgggcctgttgactaacctggcgg |
| | IGLVWRSMEHPGKLLFAPNLL | accgcgagttggtgcacatgattaactgggctaagcgggt |
| | LDRNQGKCVEGGVEIFDMLLA | gccgggcttcgtggacctgaccctgcacgaccaagtgca |
| | TSSRFRMMNLQGEEFVCLKSI | cctcctggaatgcgcctggatggaaatcctcatgatcggcc |
| | ILLNSGVYTFLSSTLKSLEEKD | tcgtgtggagatccatggagcatcccggaaagctcctgttt |
| | HIHRVLDKITDTLIHLMAKAGLT | gcacccaacctcctgcttgatcgcaaccagggaaaatgc |
| | LQQQHQRLAQLLLILSHIRHM | gtggaagggggtgtcgagattttcgacatgctgctcgccac |
| | SNKRMEHLYSMKCKNVVPLS | ctcttcccggttccggatgatgaatctgcagggagaagagt |
| | DLLLEMLDAHRLGTGAEDPRP | tcgtgtgtctgaagtcaatcatcctgctgaactccggggtct |
| | SRKRRSLGDVGQVQLVQSGA | ataccttcctgagctcgaccctcaagtcactggaggaaaa |
| | EVKKPGASVKVSCKASGYTFT | agaccacatccatcgcgtgctcgataagatcaccgacac |
| | GYYMHWVRQAPGQGLEWM | ccttatccatctcatggcgaaggctggactgaccctgcaac |
| | GWINPNSGGTNYAQKFQGRV | agcagcaccagaggctggcccagttgctgctgattctgag |
| | TLTRDTSISTVYMELSRLRSD | ccacatccggcacatgtcgaacaagaggatggaacacc |
| | DTAVYYCARDMNILATVPFDI | tgtacagcatgaagtgcaagaacgtcgtgcctctgtccgat |
| | WGQGTMVTVSSGGGGSGGG | ctgctcctggaaatgctggacgcgcacagactcggaacc |
| | GSGGGGSDIQMTQSPSSLSA | ggcgcggaagacccccggccctccaggaagcgaaggt |
| | SVGDRVTITCRASQSISSYLN | ccctcggagacgtgggtcaagtgcaactcgtccaaagcg |
| | WYQQKPGKAPKLLIYAASSLQ | gagcggaagtcaagaaacccggagcgagcgtgaaagt |
| | SGVPSRFSGSGSGTDFTLTV | gtcctgcaaagcctccggctacacctttacgggctactaca |
| | NSLQPEDFATYYCQQGDSVP | tgcactgggtgcgccaggcaccaggacagggtcttgaat |
| | LTFGGGTRLEIKTTTPAPRPPT | ggatgggatggatcaaccctaattcgggcggaactaacta |
| | PAPTIASQPLSLRPEACRPAA | cgcacagaagttccaggggagagtgactctgactcggga |
| | GGAVHTRGLDFACDIYIWAPL | tacctccatctcaactgtctacatggaactctcccgcttgcg |
| | AGTCGVLLLSLVITLYCKRGRK | gtcagatgatacggcagtgtactactgcgcccgcgacatg |
| | KLLYIFKQPFMRPVQTTQEED | aatatcctggctaccgtgccgttcgacatctggggacagg |
| | GCSCRFPEEEEGGCELRVKF | ggactatggttactgtctcatcgggcggtggaggttcagga |
| | SRSADAPAYQQGQNQLYNEL | ggaggcggctcgggaggcggaggttcggacattcagat |
| | NLGRREEYDVLDKRRGRDPE | gacccagtccccatcctctctgtcggccagcgtcggagat |
| | MGGKPRRKNPQEGLYNELQK | agggtgaccattacctgtcgggcctcgcaaagcatctcctc |
| | DKMAEAYSEIGMKGERRRGK | gtacctcaactggtatcagcaaaagccgggaaaggcgc |
| | GHDGLYQGLSTATKDTYDAL | ctaagctgctgatctacgccgcttcgagcttgcaaagcgg |
| | HMQALPPR (SEQ ID NO: | ggtgccatccagattctcgggatcaggctcaggaaccga |
| | 1019) | cttcaccctgaccgtgaacagcctccagccggaggacttt |
| | | gccacttactactgccagcagggagactccgtgccgctta |
| | | ctttcggggggggtacccgcctggagatcaagaccacta |
| | | ccccagcaccgaggccacccaccccggctcctaccatcg |
| | | cctcccagcctctgtccctgcgtccggaggcatgtagaccc |
| | | gcagctggtggggccgtgcatacccggggtcttgacttcg |
| | | cctgcgatatctacatttgggcccctctggctggtacttgcgg |
| | | ggtcctgctgctttcactcgtgatcactctttactgtaagcgcg |
| | | gtcggaagaagctgctgtacatctttaagcaacccttcatg |
| | | aggcctgtgcagactactcaagaggaggacggctgttcat |
| | | gccggttcccagaggaggaggaaggcggctgcgaactg |
| | | cgcgtgaaattcagccgcagcgcagatgctccagcctac |
| | | cagcaggggcagaaccagctctacaacgaactcaatctt |
| | | ggtcggagagaggagtacgacgtgctggacaagcgga |
| | | gaggacgggacccagaaatgggcgggaagccgcgca |
| | | gaaagaatccccaagagggcctgtacaacgagctccaa |
| | | aaggataagatggcagaagcctatagcgagattggtatg |
| | | aaaggggaacgcagaagaggcaaaggccacgacgg |
| | | actgtaccagggactcagcaccgccaccaaggacacct |
| | | atgacgctcttcacatgcaggccctgccgcctcgg (SEQ ID |
| | | NO: 1079) |
| SP-Linker 4- | MALPVTALLLPLALLLHAARPN | atggccctccctgtcaccgccctgctgcttccgctggctcttc |
| ERmut1-Furin | SLALSLTADQMVSALLDAEPPI | tgctccacgccgctcggcccaactcgttggcactttccctga |
| cleavage site 3- | LYSEYDPTRPFSEASMMGLLT | ctgccgaccagatggtgtccgcccttctggacgccgagcct |
| CD123 CAR | NLADRELVHMINWAKRVPGF | ccaattctgtactcggagtacgatccgactcgcccgttctcc |
| | VDLALHDQVHLLECAWMEILM | gaagccagcatgatgggcctgttgactaacctggcggacc |
| | IGLVWRSMEHPGKLLFAPNLL | gcgagttggtgcacatgattaactgggctaagcgggtgccg |
| | LDRNQGKCVEGGVEIFDMLLA | ggcttcgtggacctggccctgcacgaccaagtgcacctcct |
| | TSSRFRMMNLQGEEFVCLKSI | ggaatgcgcctggatggaaatcctcatgatcggcctcgtgt |
| | ILLNSGVYTFLSSTLKSLEEKD | ggagatccatggagcatcccggaaagctcctgtttgcaccc |
| | HIHRVLDKITDTLIHLMAKAGLT | aacctcctgcttgatcgcaaccagggaaaatgcgtggaag |
| | LQQQHQRLAQLLLILSHIRHM | ggggtgtcgagattttcgacatgctgctcgccacctcttccc |
| | SSKRMEHLYSMKCKNVVPLS | ggttccggatgatgaatctgcagggagaagagttcgtgtgt |
| | DLLLEMLDAHRLGTGAEDPRP | ctgaagtcaatcatcctgctgaactccggggtctataccttc |
| | SRKRRQVQLVQSGAEVKKPG | ctgagctcgaccctcaagtcactggaggaaaaagaccaca |
| | ASVKVSCKASGYTFTGYYMH | tccatcgcgtgctcgataagatcaccgacacccttatccatc |
| | WVRQAPGQGLEWMGWINPN | tcatggcgaaggctggactgaccctgcaacagcagcacca |
| | SGGTNYAQKFQGRVTLTRDT | gaggctggcccagttgctgctgattctgagccacatccggc |
| | SISTVYMELSRLRSDDTAVYY | acatgtcgtccaagaggatggaacacctgtacagcatgaa |
| | CARDMNILATVPFDIWGQGTM | gtgcaagaacgtcgtgcctctgtccgatctgctcctggaaat |
| | VTVSSGGGGSGGGGSGGGG | gctggacgcgcacagactcggaaccggcgcggaagaccc |
| | SDIQMTQSPSSLSASVGDRVT | ccggccctccaggaagcgaaggcaagtgcaactcgtccaa |
| | ITCRASQSISSYLNWYQQKPG | agcggagcggaagtcaagaaacccggagcgagcgtgaaa |
| | KAPKLLIYAASSLQSGVPSRFS | gtgtcctgcaaagcctccggctacacctttacgggctactac |
| | GSGSGTDFTLTVNSLQPEDFA | atgcactgggtgcgccaggcaccaggacagggtcttgaat |
| | TYYCQQGDSVPLTFGGGTRL | ggatgggatggatcaaccctaattcgggcggaactaacta |
| | EIKTTTPAPRPPTPAPTIASQP | cgcacagaagttccaggggagagtgactctgactcgggat |
| | LSLRPEACRPAAGGAVHTR | acctccatctcaactgtctacatggaactctcccgcttgcgg |
| | GLDFACDIYIWAPLAGTCG | tcagatgatacggcagtgtactactgcgcccgcgacatgaa |
| | VLLLSLVITLYCKRGRKKLL | tatcctggctaccgtgccgttcgacatctggggacagggga |
| | YIFKQPFMRPVQTTQEEDG | ctatggttactgtctcatcgggcggtggaggttcaggagga |
| | CSCRFPEEEEGGCELRVK | ggcggctcgggaggcggaggttcggacattcagatgaccc |
| | FSRSADAPAYQQGQNQLY | agtccccatcctctctgtcggccagcgtcggagatagggtg |
| | NELNLGRREEYDVLDKRR | accattacctgtcgggcctcgcaaagcatctcctcgtacctc |
| | GRDPEMGGKPRRKNPQE | aactggtatcagcaaaagccgggaaaggcgcctaagctgc |
| | GLYNELQKDKMAEAYSEIG | tgatctacgccgcttcgagcttgcaaagcggggtgccatcc |
| | MKGERRRGKGHDGLYQGL | agattctcgggatcaggctcaggaaccgacttcaccctgac |
| | STATKDTYDALHMQALPPR | cgtgaacagcctccagccggaggactttgccacttactact |
| | (SEQ ID NO: 1020) | gccagcagggagactccgtgccgcttactttcggggggggt |
| | | acccgcctggagatcaagaccactaccccagcaccgaggc |
| | | cacccaccccggctcctaccatcgcctcccagcctctgtccc |
| | | tgcgtccggaggcatgtagacccgcagctggtggggccgt |
| | | gcatacccggggtcttgacttcgcctgcgatatctacatttg |
| | | ggcccctctggctggtacttgcggggtcctgctgctttcactc |
| | | gtgatcactctttactgtaagcgcggtcggaagaagctgct |
| | | gtacatctttaagcaacccttcatgaggcctgtgcagactac |
| | | tcaagaggaggacggctgttcatgccggttcccagaggag |
| | | gaggaaggcggctgcgaactgcgcgtgaaattcagccgca |
| | | gcgcagatgctccagcctaccagcaggggcagaaccagct |
| | | ctacaacgaactcaatcttggtcggagagaggagtacgac |
| | | gtgctggacaagcggagaggacgggacccagaaatgggc |
| | | gggaagccgcgcagaaagaatccccaagagggcctgtac |
| | | aacgagctccaaaaggataagatggcagaagcctatagc |
| | | gagattggtatgaaaggggaacgcagaagaggcaaaggc |
| | | cacgacggactgtaccagggactcagcaccgccaccaagg |
| | | acacctatgacgctcttcacatgcaggccctgccgcctcgg |
| | | (SEQ ID NO: 1080) |
| SP-Linker 4- | MALPVTALLLPLALLLHAARPN | atggccctccctgtcaccgccctgctgcttccgctggctcttc |
| ERmut2-Furin | SLALSLTADQMVSALLDAEPPI | tgctccacgccgctcggcccaacTcgttggcactttccctg |
| cleavage site 3- | LYSEYDPTRPFSEASMMGLLT | actgccgaccagatggtgtccgcccttctggacgccgagc |
| CD123 CAR | NLADRELVHMINWAKRVPGF | ctccaattctgtactcggagtacgatccgactcgcccgttct |
| | VDLTLHDQVHLLECAWMEILM | ccgaagccagcatgatgggcctgttgactaacctggcgg |
| | IGLVWRSMEHPGKLLFAPNLL | accgcgagttggtgcacatgattaactgggctaagcgggt |
| | LDRNQGKCVEGGVEIFDMLLA | gccgggcttcgtggacctgaccctgcacgaccaagtgca |
| | TSSRFRMMNLQGEEFVCLKSI | cctcctggaatgcgcctggatggaaatcctcatgatcggcc |
| | ILLNSGVYTFLSSTLKSLEEKD | tcgtgtggagatccatggagcatcccggaaagctcctgttt |
| | HIHRVLDKITDTLIHLMAKAGLT | gcacccaacctcctgcttgatcgcaaccagggaaaatgc |
| | LQQQHQRLAQLLLILSHIRHM | gtggaagggggtgtcgagattttcgacatgctgctcgccac |
| | SNKRMEHLYSMKCKNVVPLS | ctcttcccggttccggatgatgaatctgcagggagaagagt |
| | DLLLEMLDAHRLGTGAEDPRP | tcgtgtgtctgaagtcaatcatcctgctgaactccggggtct |
| | SRKRRQVQLVQSGAEVKKPG | ataccttcctgagctcgaccctcaagtcactggaggaaaa |
| | ASVKVSCKASGYTFTGYYMH | agaccacatccatcgcgtgctcgataagatcaccgacac |
| | WVRQAPGQGLEWMGWINPN | ccttatccatctcatggcgaaggctggactgaccctgcaac |
| | SGGTNYAQKFQGRVTLTRDT | agcagcaccagaggctggcccagttgctgctgattctgag |
| | SISTVYMELSRLRSDDTAVYY | ccacatccggcacatgtcgaacaagaggatggaacacc |
| | CARDMNILATVPFDIWGQGTM | tgtacagcatgaagtgcaagaacgtcgtgcctctgtccgat |
| | VTVSSGGGGSGGGGSGGGG | ctgctcctggaaatgctggacgcgcacagactcgggacg |
| | SDIQMTQSPSSLSASVGDRVT | ggagctgaagatccacgacccagcagaaagcgacggc |
| | ITCRASQSISSYLNWYQQKPG | aagtgcaactcgtccaaagcggagcggaagtcaagaaa |
| | KAPKLLIYAASSLQSGVPSRFS | cccggagcgagcgtgaaagtgtcctgcaaagcctccggc |
| | GSGSGTDFTLTVNSLQPEDFA | tacacctttacgggctactacatgcactgggtgcgccaggc |
| | TYYCQQGDSVPLTFGGGTRL | accaggacagggtcttgaatggatgggatggatcaaccct |
| | EIKTTTPAPRPPTPAPTIASQP | aattcgggcggaactaactacgcacagaagttccagggg |
| | LSLRPEACRPAAGGAVHTRG | agagtgactctgactcgggatacctccatctcaactgtctac |
| | LDFACDIYIWAPLAGTCGVLLL | atggaactctcccgcttgcggtcagatgatacggcagtgta |
| | SLVITLYCKRGRKKLLYIFKQP | ctactgcgcccgcgacatgaatatcctggctaccgtgccgt |
| | FMRPVQTTQEEDGCSCRFPE | tcgacatctggggacaggggactatggttactgtctcatcg |
| | EEEGGCELRVKFSRSADAPA | ggcggtggaggttcaggaggaggcggctcgggaggcg |
| | YQQGQNQLYNELNLGRREEY | gaggttcggacattcagatgacccagtccccatcctctctgt |
| | DVLDKRRGRDPEMGGKPRRK | cggccagcgtcggagatagggtgaccattacctgtcggg |
| | NPQEGLYNELQKDKMAEAYS | cctcgcaaagcatctcctcgtacctcaactggtatcagcaa |
| | EIGMKGERRRGKGHDGLYQG | aagccgggaaaggcgcctaagctgctgatctacgccgct |
| | LSTATKDTYDALHMQALPPR | tcgagcttgcaaagcggggtgccatccagattctcgggat |
| | (SEQ ID NO: 1021) | caggctcaggaaccgacttcaccctgaccgtgaacagcc |
| | | tccagccggaggactttgccacttactactgccagcaggg |
| | | agactccgtgccgcttactttcggggggggtacccgcctgg |
| | | agatcaagaccactaccccagcaccgaggccacccacc |
| | | ccggctcctaccatcgcctcccagcctctgtccctgcgtccg |
| | | gaggcatgtagacccgcagctggtggggccgtgcatacc |
| | | cggggtcttgacttcgcctgcgatatctacatttgggcccctc |
| | | tggctggtacttgcggggtcctgctgctttcactcgtgatcac |
| | | tctttactgtaagcgcggtcggaagaagctgctgtacatcttt |
| | | aagcaacccttcatgaggcctgtgcagactactcaagag |
| | | gaggacggctgttcatgccggttcccagaggaggaggaa |
| | | ggcggctgcgaactgcgcgtgaaattcagccgcagcgc |
| | | agatgctccagcctaccagcaggggcagaaccagctcta |
| | | caacgaactcaatcttggtcggagagaggagtacgacgt |
| | | gctggacaagcggagaggacgggacccagaaatgggc |
| | | gggaagccgcgcagaaagaatccccaagagggcctgt |
| | | acaacgagctccaaaaggataagatggcagaagcctat |
| | | agcgagattggtatgaaaggggaacgcagaagaggca |
| | | aaggccacgacggactgtaccagggactcagcaccgcc |
| | | accaaggacacctatgacgctcttcacatgcaggccctgc |
| | | cgcctcgg (SEQ ID NO: 1081) |
| SP-Linker 4- | MALPVTALLLPLALLLHAARPN | atggccctccctgtcaccgccctgctgcttccgctggctcttc |
| ERmut1-Furin | SLALSLTADQMVSALLDAEPPI | tgctccacgccgctcggcccaacTcgttggcactttccctg |
| cleavage site 2- | LYSEYDPTRPFSEASMMGLLT | actgccgaccagatggtgtccgcccttctggacgccgagc |
| BCMA CAR | NLADRELVHMINWAKRVPGF | ctccaattctgtactcggagtacgatccgactcgcccgttct |
| | VDLALHDQVHLLECAWMEILM | ccgaagccagcatgatgggcctgttgactaacctggcgg |
| | IGLVWRSMEHPGKLLFAPNLL | accgcgagttggtgcacatgattaactgggctaagcgggt |
| | LDRNQGKCVEGGVEIFDMLLA | gccgggcttcgtggacctggccctgcacgaccaagtgca |
| | TSSRFRMMNLQGEEFVCLKSI | cctcctggaatgcgcctggatggaaatcctcatgatcggcc |
| | ILLNSGVYTFLSSTLKSLEEKD | tcgtgtggagatccatggagcatcccggaaagctcctgttt |
| | HIHRVLDKITDTLIHLMAKAGLT | gcacccaacctcctgcttgatcgcaaccagggaaaatgc |
| | LQQQHQRLAQLLLILSHIRHM | gtggaagggggtgtcgagattttcgacatgctgctcgccac |
| | SSKRMEHLYSMKCKNVVPLS | ctcttcccggttccggatgatgaatctgcagggagaagagt |
| | DLLLEMLDAHRLGTGAEDPRP | tcgtgtgtctgaagtcaatcatcctgctgaactccggggtct |
| | SRKRRSLGDVGEVQLVESGG | ataccttcctgagctcgaccctcaagtcactggaggaaaa |
| | GLVQPGGSLRLSCAVSGFALS | agaccacatccatcgcgtgctcgataagatcaccgacac |
| | NHGMSWVRRAPGKGLEWVS | ccttatccatctcatggcgaaggctggactgaccctgcaac |
| | GIVYSGSTYYAASVKGRFTISR | agcagcaccagaggctggcccagttgctgctgattctgag |
| | DNSRNTLYLQMNSLRPEDTAI | ccacatccggcacatgtcgtccaagaggatggaacacct |
| | YYCSAHGGESDVWGQGTTVT | gtacagcatgaagtgcaagaacgtcgtgcctctgtccgat |
| | VSSASGGGGSGGRASGGGG | ctgctcctggaaatgctggacgcgcacagactcggaacc |
| | SDIQLTQSPSSLSASVGDRVTI | ggcgcggaagacccccggccctccaggaagcgaaggt |
| | TCRASQSISSYLNWYQQKPG | ccctcggagacgtgggtgaagtgcaattggtggaatcag |
| | KAPKLLIYAASSLQSGVPSRFS | ggggaggacttgtgcagcctggaggatcgctgagactgtc |
| | GSGSGTDFTLTISSLQPEDFA | atgtgccgtgtccggctttgccctgtccaaccacgggatgtc |
| | TYYCQQSYSTPYTFGQGTKV | ctgggtccgccgcgcgcctggaaagggcctcgaatgggt |
| | EIKTTTPAPRPPTPAPTIASQP | gtcgggtattgtgtacagcggtagcacctactatgccgcat |
| | LSLRPEACRPAAGGAVHTRG | ccgtgaaggggagattcaccatcagccgggacaactcc |
| | LDFACDIYIWAPLAGTCGVLLL | aggaacactctgtacctccaaatgaattcgctgaggccag |
| | SLVITLYCKRGRKKLLYIFKQP | aggacactgccatctactactgctccgcgcatggcggaga |
| | FMRPVQTTQEEDGCSCRFPE | gtccgacgtctggggacaggggaccaccgtgaccgtgtc |
| | EEEGGCELRVKFSRSADAPA | tagcgcgtccggcggaggcggcagcgggggtcgggcat |
| | YQQGQNQLYNELNLGRREEY | cagggggcggcggatcggacatccagctcacccagtcc |
| | DVLDKRRGRDPEMGGKPRRK | ccgagctcgctgtccgcctccgtgggagatcgggtcacca |
| | NPQEGLYNELQKDKMAEAYS | tcacgtgccgcgccagccagtcgatttcctcctacctgaac |
| | EIGMKGERRRGKGHDGLYQG | tggtaccaacagaagcccggaaaagccccgaagcttctc |
| | LSTATKDTYDALHMQALPPR | atctacgccgcctcgagcctgcagtcaggagtgccctcac |
| | (SEQ ID NO: 1022) | ggttctccggctccggttccggtactgatttcaccctgaccat |
| | | ttcctccctgcaaccggaggacttcgctacttactactgcca |
| | | gcagtcgtactccaccccctacactttcggacaaggcacc |
| | | aaggtcgaaatcaagaccactaccccagcaccgaggcc |
| | | acccaccccggctcctaccatcgcctcccagcctctgtccc |
| | | tgcgtccggaggcatgtagacccgcagctggtggggccg |
| | | tgcatacccggggtcttgacttcgcctgcgatatctacatttg |
| | | ggcccctctggctggtacttgcggggtcctgctgctttcactc |
| | | gtgatcactctttactgtaagcgcggtcggaagaagctgct |
| | | gtacatctttaagcaacccttcatgaggcctgtgcagacta |
| | | ctcaagaggaggacggctgttcatgccggttcccagagg |
| | | aggaggaaggcggctgcgaactgcgcgtgaaattcagc |
| | | cgcagcgcagatgctccagcctaccagcaggggcagaa |
| | | ccagctctacaacgaactcaatcttggtcggagagagga |
| | | gtacgacgtgctggacaagcggagaggacgggaccca |
| | | gaaatgggcgggaagccgcgcagaaagaatccccaag |
| | | agggcctgtacaacgagctccaaaaggataagatggca |
| | | gaagcctatagcgagattggtatgaaaggggaacgcag |
| | | aagaggcaaaggccacgacggactgtaccagggactc |
| | | agcaccgccaccaaggacacctatgacgctcttcacatg |
| | | caggccctgccgcctcgg (SEQ ID NO: 1082) |
| SP-Linker 4- | MALPVTALLLPLALLLHAARPN | atggccctccctgtcaccgccctgctgcttccgctggctcttc |
| ERmut2-Furin | SLALSLTADQMVSALLDAEPPI | tgctccacgccgctcggcccaacTcgttggcactttccctg |
| cleavage site 2- | LYSEYDPTRPFSEASMMGLLT | actgccgaccagatggtgtccgcccttctggacgccgagc |
| BCMA CAR | NLADRELVHMINWAKRVPGF | ctccaattctgtactcggagtacgatccgactcgcccgttct |
| | VDLTLHDQVHLLECAWMEILM | ccgaagccagcatgatgggcctgttgactaacctggcgg |
| | IGLVWRSMEHPGKLLFAPNLL | accgcgagttggtgcacatgattaactgggctaagcgggt |
| | LDRNQGKCVEGGVEIFDMLLA | gccgggcttcgtggacctgaccctgcacgaccaagtgca |
| | TSSRFRMMNLQGEEFVCLKSI | cctcctggaatgcgcctggatggaaatcctcatgatcggcc |
| | ILLNSGVYTFLSSTLKSLEEKD | tcgtgtggagatccatggagcatcccggaaagctcctgttt |
| | HIHRVLDKITDTLIHLMAKAGLT | gcacccaacctcctgcttgatcgcaaccagggaaaatgc |
| | LQQQHQRLAQLLLILSHIRHM | gtggaagggggtgtcgagattttcgacatgctgctcgccac |
| | SNKRMEHLYSMKCKNVVPLS | ctcttcccggttccggatgatgaatctgcagggagaagagt |
| | DLLLEMLDAHRLGTGAEDPRP | tcgtgtgtctgaagtcaatcatcctgctgaactccggggtct |
| | SRKRRSLGDVGEVQLVESGG | ataccttcctgagctcgaccctcaagtcactggaggaaaa |
| | GLVQPGGSLRLSCAVSGFALS | agaccacatccatcgcgtgctcgataagatcaccgacac |
| | NHGMSWVRRAPGKGLEWVS | ccttatccatctcatggcgaaggctggactgaccctgcaac |
| | GIVYSGSTYYAASVKGRFTISR | agcagcaccagaggctggcccagttgctgctgattctgag |
| | DNSRNTLYLQMNSLRPEDTAI | ccacatccggcacatgtcgaacaagaggatggaacacc |
| | YYCSAHGGESDVWGQGTTVT | tgtacagcatgaagtgcaagaacgtcgtgcctctgtccgat |
| | VSSASGGGGSGGRASGGGG | ctgctcctggaaatgctggacgcgcacagactcggaacc |
| | SDIQLTQSPSSLSASVGDRVTI | ggcgcggaagacccccggccctccaggaagcgaaggt |
| | TCRASQSISSYLNWYQQKPG | ccctcggagacgtgggtgaagtgcaattggtggaatcag |
| | KAPKLLIYAASSLQSGVPSRFS | ggggaggacttgtgcagcctggaggatcgctgagactgtc |
| | GSGSGTDFTLTISSLQPEDFA | atgtgccgtgtccggctttgccctgtccaaccacgggatgtc |
| | TYYCQQSYSTPYTFGQGTKV | ctgggtccgccgcgcgcctggaaagggcctcgaatgggt |
| | EIKTTTPAPRPPTPAPTIASQP | gtcgggtattgtgtacagcggtagcacctactatgccgcat |
| | LSLRPEACRPAAGGAVHTRG | ccgtgaaggggagattcaccatcagccgggacaactcc |
| | LDFACDIYIWAPLAGTCGVLLL | aggaacactctgtacctccaaatgaattcgctgaggccag |
| | SLVITLYCKRGRKKLLYIFKQP | aggacactgccatctactactgctccgcgcatggcggaga |
| | FMRPVQTTQEEDGCSCRFPE | gtccgacgtctggggacaggggaccaccgtgaccgtgtc |
| | EEEGGCELRVKFSRSADAPA | tagcgcgtccggcggaggcggcagcgggggtcgggcat |
| | YQQGQNQLYNELNLGRREEY | cagggggcggcggatcggacatccagctcacccagtcc |
| | DVLDKRRGRDPEMGGKPRRK | ccgagctcgctgtccgcctccgtgggagatcgggtcacca |
| | NPQEGLYNELQKDKMAEAYS | tcacgtgccgcgccagccagtcgatttcctcctacctgaac |
| | EIGMKGERRRGKGHDGLYQG | tggtaccaacagaagcccggaaaagccccgaagcttctc |
| | LSTATKDTYDALHMQALPPR | atctacgccgcctcgagcctgcagtcaggagtgccctcac |
| | (SEQ ID NO: 1023) | ggttctccggctccggttccggtactgatttcaccctgaccat |
| | | ttcctccctgcaaccggaggacttcgctacttactactgcca |
| | | gcagtcgtactccaccccctacactttcggacaaggcacc |
| | | aaggtcgaaatcaagaccactaccccagcaccgaggcc |
| | | acccaccccggctcctaccatcgcctcccagcctctgtccc |
| | | tgcgtccggaggcatgtagacccgcagctggtggggccg |
| | | tgcatacccggggtcttgacttcgcctgcgatatctacatttg |
| | | ggcccctctggctggtacttgcggggtcctgctgctttcactc |
| | | gtgatcactctttactgtaagcgcggtcggaagaagctgct |
| | | gtacatctttaagcaacccttcatgaggcctgtgcagacta |
| | | ctcaagaggaggacggctgttcatgccggttcccagagg |
| | | aggaggaaggcggctgcgaactgcgcgtgaaattcagc |
| | | cgcagcgcagatgctccagcctaccagcaggggcagaa |
| | | ccagctctacaacgaactcaatcttggtcggagagagga |
| | | gtacgacgtgctggacaagcggagaggacgggaccca |
| | | gaaatgggcgggaagccgcgcagaaagaatccccaag |
| | | agggcctgtacaacgagctccaaaaggataagatggca |
| | | gaagcctatagcgagattggtatgaaaggggaacgcag |
| | | aagaggcaaaggccacgacggactgtaccagggactc |
| | | agcaccgccaccaaggacacctatgacgctcttcacatg |
| | | caggccctgccgcctcgg (SEQ ID NO: 1083) |
| SP-Linker 4- | MALPVTALLLPLALLLHAARPN | atggccctccctgtcaccgccctgctgcttccgctggctcttc |
| ERmut1-Furin | SLALSLTADQMVSALLDAEPPI | tgctccacgccgctcggcccaacTcgttggcactttccctg |
| cleavage site 3- | LYSEYDPTRPFSEASMMGLLT | actgccgaccagatggtgtccgcccttctggacgccgagc |
| BCMA CAR | NLADRELVHMINWAKRVPGF | ctccaattctgtactcggagtacgatccgactcgcccgttct |
| | VDLALHDQVHLLECAWMEILM | ccgaagccagcatgatgggcctgttgactaacctggcgg |
| | IGLVWRSMEHPGKLLFAPNLL | accgcgagttggtgcacatgattaactgggctaagcgggt |
| | LDRNQGKCVEGGVEIFDMLLA | gccgggcttcgtggacctggccctgcacgaccaagtgca |
| | TSSRFRMMNLQGEEFVCLKSI | cctcctggaatgcgcctggatggaaatcctcatgatcggcc |
| | ILLNSGVYTFLSSTLKSLEEKD | tcgtgtggagatccatggagcatcccggaaagctcctgttt |
| | HIHRVLDKITDTLIHLMAKAGLT | gcacccaacctcctgcttgatcgcaaccagggaaaatgc |
| | LQQQHQRLAQLLLILSHIRHM | gtggaagggggtgtcgagattttcgacatgctgctcgccac |
| | SSKRMEHLYSMKCKNVVPLS | ctcttcccggttccggatgatgaatctgcagggagaagagt |
| | DLLLEMLDAHRLGTGAEDPRP | tcgtgtgtctgaagtcaatcatcctgctgaactccggggtct |
| | SRKRREVQLVESGGGLVQPG | ataccttcctgagctcgaccctcaagtcactggaggaaaa |
| | GSLRLSCAVSGFALSNHGMS | agaccacatccatcgcgtgctcgataagatcaccgacac |
| | WVRRAPGKGLEWVSGIVYSG | ccttatccatctcatggcgaaggctggactgaccctgcaac |
| | STYYAASVKGRFTISRDNSRN | agcagcaccagaggctggcccagttgctgctgattctgag |
| | TLYLQMNSLRPEDTAIYYCSA | ccacatccggcacatgtcgtccaagaggatggaacacct |
| | HGGESDVWGQGTTVTVSSAS | gtacagcatgaagtgcaagaacgtcgtgcctctgtccgat |
| | GGGGSGGRASGGGGSDIQLT | ctgctcctggaaatgctggacgcgcacagactcGggacg |
| | QSPSSLSASVGDRVTITCRAS | ggagctgaagatccacgacccagcagaaagcgacggg |
| | QSISSYLNWYQQKPGKAPKLL | aagtgcaattggtggaatcagggggaggacttgtgcagc |
| | IYAASSLQSGVPSRFSGSGSG | ctggaggatcgctgagactgtcatgtgccgtgtccggctttg |
| | TDFTLTISSLQPEDFATYYCQ | ccctgtccaaccacgggatgtcctgggtccgccgcgcgcc |
| | QSYSTPYTFGQGTKVEIKTTT | tggaaagggcctcgaatgggtgtcgggtattgtgtacagc |
| | PAPRPPTPAPTIASQPLSLRPE | ggtagcacctactatgccgcatccgtgaaggggagattca |
| | ACRPAAGGAVHTRGLDFACDI | ccatcagccgggacaactccaggaacactctgtacctcc |
| | YIWAPLAGTCGVLLLSLVITLY | aaatgaattcgctgaggccagaggacactgccatctacta |
| | CKRGRKKLLYIFKQPFMRPVQ | ctgctccgcgcatggcggagagtccgacgtctggggaca |
| | TTQEEDGCSCRFPEEEEGGC | ggggaccaccgtgaccgtgtctagcgcgtccggcggag |
| | ELRVKFSRSADAPAYQQGQN | gcggcagcgggggtcgggcatcagggggcggcggatc |
| | QLYNELNLGRREEYDVLDKR | ggacatccagctcacccagtccccgagctcgctgtccgcc |
| | RGRDPEMGGKPRRKNPQEG | tccgtgggagatcgggtcaccatcacgtgccgcgccagc |
| | LYNELQKDKMAEAYSEIGMKG | cagtcgatttcctcctacctgaactggtaccaacagaagcc |
| | ERRRGKGHDGLYQGLSTATK | cggaaaagccccgaagcttctcatctacgccgcctcgag |
| | DTYDALHMQALPPR | cctgcagtcaggagtgccctcacggttctccggctccggtt |
| | (SEQ ID NO: 1024) | ccggtactgatttcaccctgaccatttcctccctgcaaccgg |
| | | aggacttcgctacttactactgccagcagtcgtactccacc |
| | | ccctacactttcggacaaggcaccaaggtcgaaatcaag |
| | | accactaccccagcaccgaggccacccaccccggctcct |
| | | accatcgcctcccagcctctgtccctgcgtccggaggcatg |
| | | tagacccgcagctggtggggccgtgcatacccggggtctt |
| | | gacttcgcctgcgatatctacatttgggcccctctggctggta |
| | | cttgcggggtcctgctgctttcactcgtgatcactctttactgta |
| | | agcgcggtcggaagaagctgctgtacatctttaagcaacc |
| | | cttcatgaggcctgtgcagactactcaagaggaggacgg |
| | | ctgttcatgccggttcccagaggaggaggaaggcggctg |
| | | cgaactgcgcgtgaaattcagccgcagcgcagatgctcc |
| | | agcctaccagcaggggcagaaccagctctacaacgaac |
| | | tcaatcttggtcggagagaggagtacgacgtgctggaca |
| | | agcggagaggacgggacccagaaatgggcgggaagc |
| | | cgcgcagaaagaatccccaagagggcctgtacaacga |
| | | gctccaaaaggataagatggcagaagcctatagcgaga |
| | | ttggtatgaaaggggaacgcagaagaggcaaaggcca |
| | | cgacggactgtaccagggactcagcaccgccaccaagg |
| | | acacctatgacgctcttcacatgcaggccctgccgcctcg |
| | | g (SEQ ID NO: 1084) |
| SP-Linker 4- | MALPVTALLLPLALLLHAARPN | atggccctccctgtcaccgccctgctgcttccgctggctcttc |
| ERmut2-Furin | SLALSLTADQMVSALLDAEPPI | tgctccacgccgctcggcccaacTcgttggcactttccctg |
| cleavage site 3- | LYSEYDPTRPFSEASMMGLLT | actgccgaccagatggtgtccgcccttctggacgccgagc |
| BCMA CAR | NLADRELVHMINWAKRVPGF | ctccaattctgtactcggagtacgatccgactcgcccgttct |
| | VDLTLHDQVHLLECAWMEILM | ccgaagccagcatgatgggcctgttgactaacctggcgg |
| | IGLVWRSMEHPGKLLFAPNLL | accgcgagttggtgcacatgattaactgggctaagcgggt |
| | LDRNQGKCVEGGVEIFDMLLA | gccgggcttcgtggacctgaccctgcacgaccaagtgca |
| | TSSRFRMMNLQGEEFVCLKSI | cctcctggaatgcgcctggatggaaatcctcatgatcggcc |
| | ILLNSGVYTFLSSTLKSLEEKD | tcgtgtggagatccatggagcatcccggaaagctcctgttt |
| | HIHRVLDKITDTLIHLMAKAGLT | gcacccaacctcctgcttgatcgcaaccagggaaaatgc |
| | LQQQHQRLAQLLLILSHIRHM | gtggaagggggtgtcgagattttcgacatgctgctcgccac |
| | SNKRMEHLYSMKCKNVVPLS | ctcttcccggttccggatgatgaatctgcagggagaagagt |
| | DLLLEMLDAHRLGTGAEDPRP | tcgtgtgtctgaagtcaatcatcctgctgaactccggggtct |
| | SRKRREVQLVESGGGLVQPG | ataccttcctgagctcgaccctcaagtcactggaggaaaa |
| | GSLRLSCAVSGFALSNHGMS | agaccacatccatcgcgtgctcgataagatcaccgacac |
| | WVRRAPGKGLEWVSGIVYSG | ccttatccatctcatggcgaaggctggactgaccctgcaac |
| | STYYAASVKGRFTISRDNSRN | agcagcaccagaggctggcccagttgctgctgattctgag |
| | TLYLQMNSLRPEDTAIYYCSA | ccacatccggcacatgtcgaacaagaggatggaacacc |
| | HGGESDVWGQGTTVTVSSAS | tgtacagcatgaagtgcaagaacgtcgtgcctctgtccgat |
| | GGGGSGGRASGGGGSDIQLT | ctgctcctggaaatgctggacgcgcacagactcgggacg |
| | QSPSSLSASVGDRVTITCRAS | ggagctgaagatccacgacccagcagaaagcgacggg |
| | QSISSYLNWYQQKPGKAPKLL | aagtgcaattggtggaatcagggggaggacttgtgcagc |
| | IYAASSLQSGVPSRFSGSGSG | ctggaggatcgctgagactgtcatgtgccgtgtccggctttg |
| | TDFTLTISSLQPEDFATYYCQ | ccctgtccaaccacgggatgtcctgggtccgccgcgcgcc |
| | QSYSTPYTFGQGTKVEIKTTT | tggaaagggcctcgaatgggtgtcgggtattgtgtacagc |
| | PAPRPPTPAPTIASQPLSLRPE | ggtagcacctactatgccgcatccgtgaaggggagattca |
| | ACRPAAGGAVHTRGLDFACDI | ccatcagccgggacaactccaggaacactctgtacctcc |
| | YIWAPLAGTCGVLLLSLVITLY | aaatgaattcgctgaggccagaggacactgccatctacta |
| | CKRGRKKLLYIFKQPFMRPVQ | ctgctccgcgcatggcggagagtccgacgtctggggaca |
| | TTQEEDGCSCRFPEEEEGGC | ggggaccaccgtgaccgtgtctagcgcgtccggcggag |
| | ELRVKFSRSADAPAYQQGQN | gcggcagcgggggtcgggcatcagggggcggcggatc |
| | QLYNELNLGRREEYDVLDKR | ggacatccagctcacccagtccccgagctcgctgtccgcc |
| | RGRDPEMGGKPRRKNPQEG | tccgtgggagatcgggtcaccatcacgtgccgcgccagc |
| | LYNELQKDKMAEAYSEIGMKG | cagtcgatttcctcctacctgaactggtaccaacagaagcc |
| | ERRRGKGHDGLYQGLSTATK | cggaaaagccccgaagcttctcatctacgccgcctcgag |
| | DTYDALHMQALPPR | cctgcagtcaggagtgccctcacggttctccggctccggtt |
| | (SEQ ID NO: 1025) | ccggtactgatttcaccctgaccatttcctccctgcaaccgg |
| | | aggacttcgctacttactactgccagcagtcgtactccacc |
| | | ccctacactttcggacaaggcaccaaggtcgaaatcaag |
| | | accactaccccagcaccgaggccacccaccccggctcct |
| | | accatcgcctcccagcctctgtccctgcgtccggaggcatg |
| | | tagacccgcagctggtggggccgtgcatacccggggtctt |
| | | gacttcgcctgcgatatctacatttgggcccctctggctggta |
| | | cttgcggggtcctgctgctttcactcgtgatcactctttactgta |
| | | agcgcggtcggaagaagctgctgtacatctttaagcaacc |
| | | cttcatgaggcctgtgcagactactcaagaggaggacgg |
| | | ctgttcatgccggttcccagaggaggaggaaggcggctg |
| | | cgaactgcgcgtgaaattcagccgcagcgcagatgctcc |
| | | agcctaccagcaggggcagaaccagctctacaacgaac |
| | | tcaatcttggtcggagagaggagtacgacgtgctggaca |
| | | agcggagaggacgggacccagaaatgggcgggaagc |
| | | cgcgcagaaagaatccccaagagggcctgtacaacga |
| | | gctccaaaaggataagatggcagaagcctatagcgaga |
| | | ttggtatgaaaggggaacgcagaagaggcaaaggcca |
| | | cgacggactgtaccagggactcagcaccgccaccaagg |
| | | acacctatgacgctcttcacatgcaggccctgccgcctcg |
| | | g (SEQ ID NO: 1085) |
| SP-Linker 5- | MALPVTALLLPLALLLHAARPE | atggccctccctgtcaccgccctgctgcttccgctggctcttc |
| ERmut1-Furin | SLALSLTADQMVSALLDAEPPI | tgctccacgccgctcggcccgagtcgttggcactttccctg |
| cleavage site 2- | LYSEYDPTRPFSEASMMGLLT | actgccgaccagatggtgtccgcccttctggacgccgagc |
| CD19 CAR2 | NLADRELVHMINWAKRVPGF | ctccaattctgtactcggagtacgatccgactcgcccgttct |
| | VDLALHDQVHLLECAWMEILM | ccgaagccagcatgatgggcctgttgactaacctggcgg |
| | IGLVWRSMEHPGKLLFAPNLL | accgcgagttggtgcacatgattaactgggctaagcgggt |
| | LDRNQGKCVEGGVEIFDMLLA | gccgggcttcgtggacctggccctgcacgaccaagtgca |
| | TSSRFRMMNLQGEEFVCLKSI | cctcctggaatgcgcctggatggaaatcctcatgatcggcc |
| | ILLNSGVYTFLSSTLKSLEEKD | tcgtgtggagatccatggagcatcccggaaagctcctgttt |
| | HIHRVLDKITDTLIHLMAKAGLT | gcacccaacctcctgcttgatcgcaaccagggaaaatgc |
| | LQQQHQRLAQLLLILSHIRHM | gtggaagggggtgtcgagattttcgacatgctgctcgccac |
| | SSKRMEHLYSMKCKNVVPLS | ctcttcccggttccggatgatgaatctgcagggagaagagt |
| | DLLLEMLDAHRLGTGAEDPRP | tcgtgtgtctgaagtcaatcatcctgctgaactccggggtct |
| | SRKRRSLGDVGEIVMTQSPAT | ataccttcctgagctcgaccctcaagtcactggaggaaaa |
| | LSLSPGERATLSCRASQDISK | agaccacatccatcgcgtgctcgataagatcaccgacac |
| | YLNWYQQKPGQAPRLLIYHTS | ccttatccatctcatggcgaaggctggactgaccctgcaac |
| | RLHSGIPARFSGSGSGTDYTL | agcagcaccagaggctggcccagttgctgctgattctgag |
| | TISSLQPEDFAVYFCQQGNTL | ccacatccggcacatgtcgtccaagaggatggaacacct |
| | PYTFGQGTKLEIKGGGGSGG | gtacagcatgaagtgcaagaacgtcgtgcctctgtccgat |
| | GGSGGGGSQVQLQESGPGL | ctgctcctggaaatgctggacgcgcacagactcggaacc |
| | VKPSETLSLTCTVSGVSLPDY | ggcgcggaagacccccggccctccaggaagcgaaggt |
| | GVSWIRQPPGKGLEWIGVIW | ccctcggagacgtgggtgaaattgtgatgacccagtcacc |
| | GSETTYYSSSLKSRVTISKDN | cgccactcttagcctttcacccggtgagcgcgcaaccctgt |
| | SKNQVSLKLSSVTAADTAVYY | cttgcagagcctcccaagacatctcaaaataccttaattgg |
| | CAKHYYYGGSYAMDYWGQG | tatcaacagaagcccggacaggctcctcgccttctgatcta |
| | TLVTVSSTTTPAPRPPTPAPTI | ccacaccagccggctccattctggaatccctgccaggttc |
| | ASQPLSLRPEACRPAAGGAV | agcggtagcggatctgggaccgactacaccctcactatca |
| | HTRGLDFACDIYIWAPLAGTC | gctcactgcagccagaggacttcgctgtctatttctgtcagc |
| | GVLLLSLVITLYCKRGRKKLLYI | aagggaacaccctgccctacacctttggacagggcacca |
| | FKQPFMRPVQTTQEEDGCSC | agctcgagattaaaggtggaggtggcagcggaggaggt |
| | RFPEEEEGGCELRVKFSRSA | gggtccggcggtggaggaagccaggtccaactccaaga |
| | DAPAYQQGQNQLYNELNLGR | aagcggaccgggtcttgtgaagccatcagaaactctttca |
| | REEYDVLDKRRGRDPEMGGK | ctgacttgtactgtgagcggagtgtctctccccgattacggg |
| | PRRKNPQEGLYNELQKDKMA | gtgtcttggatcagacagccaccggggaagggtctggaat |
| | EAYSEIGMKGERRRGKGHDG | ggattggagtgatttggggctctgagactacttactactcttc |
| | LYQGLSTATKDTYDALHMQAL | atccctcaagtcacgcgtcaccatctcaaaggacaactct |
| | PPR (SEQ ID NO: 1026) | aagaatcaggtgtcactgaaactgtcatctgtgaccgcag |
| | | ccgacaccgccgtgtactattgcgctaagcattactattatg |
| | | gcgggagctacgcaatggattactggggacagggtactct |
| | | ggtcaccgtgtccagcaccactaccccagcaccgaggcc |
| | | acccaccccggctcctaccatcgcctcccagcctctgtccc |
| | | tgcgtccggaggcatgtagacccgcagctggtggggccg |
| | | tgcatacccggggtcttgacttcgcctgcgatatctacatttg |
| | | ggcccctctggctggtacttgcggggtcctgctgctttcactc |
| | | gtgatcactctttactgtaagcgcggtcggaagaagctgct |
| | | gtacatctttaagcaacccttcatgaggcctgtgcagacta |
| | | ctcaagaggaggacggctgttcatgccggttcccagagg |
| | | aggaggaaggcggctgcgaactgcgcgtgaaattcagc |
| | | cgcagcgcagatgctccagcctaccagcaggggcagaa |
| | | ccagctctacaacgaactcaatcttggtcggagagagga |
| | | gtacgacgtgctggacaagcggagaggacgggaccca |
| | | gaaatgggcgggaagccgcgcagaaagaatccccaag |
| | | agggcctgtacaacgagctccaaaaggataagatggca |
| | | gaagcctatagcgagattggtatgaaaggggaacgcag |
| | | aagaggcaaaggccacgacggactgtaccagggactc |
| | | agcaccgccaccaaggacacctatgacgctcttcacatg |
| | | caggccctgccgcctcgg (SEQ ID NO: 1086) |
| SP-Linker 5- | MALPVTALLLPLALLLHAARPE | atggccctccctgtcaccgccctgctgcttccgctggctcttc |
| ERmut2-Furin | SLALSLTADQMVSALLDAEPPI | tgctccacgccgctcggcccgagtcgttggcactttccctg |
| cleavage site 2- | LYSEYDPTRPFSEASMMGLLT | actgccgaccagatggtgtccgcccttctggacgccgagc |
| CD19 CAR2 | NLADRELVHMINWAKRVPGF | ctccaattctgtactcggagtacgatccgactcgcccgttct |
| | VDLTLHDQVHLLECAWMEILM | ccgaagccagcatgatgggcctgttgactaacctggcgg |
| | IGLVWRSMEHPGKLLFAPNLL | accgcgagttggtgcacatgattaactgggctaagcgggt |
| | LDRNQGKCVEGGVEIFDMLLA | gccgggcttcgtggacctgaccctgcacgaccaagtgca |
| | TSSRFRMMNLQGEEFVCLKSI | cctcctggaatgcgcctggatggaaatcctcatgatcggcc |
| | ILLNSGVYTFLSSTLKSLEEKD | tcgtgtggagatccatggagcatcccggaaagctcctgttt |
| | HIHRVLDKITDTLIHLMAKAGLT | gcacccaacctcctgcttgatcgcaaccagggaaaatgc |
| | LQQQHQRLAQLLLILSHIRHM | gtggaagggggtgtcgagattttcgacatgctgctcgccac |
| | SNKRMEHLYSMKCKNVVPLS | ctcttcccggttccggatgatgaatctgcagggagaagagt |
| | DLLLEMLDAHRLGTGAEDPRP | tcgtgtgtctgaagtcaatcatcctgctgaactccggggtct |
| | SRKRRSLGDVGEIVMTQSPAT | ataccttcctgagctcgaccctcaagtcactggaggaaaa |
| | LSLSPGERATLSCRASQDISK | agaccacatccatcgcgtgctcgataagatcaccgacac |
| | YLNWYQQKPGQAPRLLIYHTS | ccttatccatctcatggcgaaggctggactgaccctgcaac |
| | RLHSGIPARFSGSGSGTDYTL | agcagcaccagaggctggcccagttgctgctgattctgag |
| | TISSLQPEDFAVYFCQQGNTL | ccacatccggcacatgtcgaacaagaggatggaacacc |
| | PYTFGQGTKLEIKGGGGSGG | tgtacagcatgaagtgcaagaacgtcgtgcctctgtccgat |
| | GGSGGGGSQVQLQESGPGL | ctgctcctggaaatgctggacgcgcacagactcggaacc |
| | VKPSETLSLTCTVSGVSLPDY | ggcgcggaagacccccggccctccaggaagcgaaggt |
| | GVSWIRQPPGKGLEWIGVIW | ccctcggagacgtgggtgaaattgtgatgacccagtcacc |
| | GSETTYYSSSLKSRVTISKDN | cgccactcttagcctttcacccggtgagcgcgcaaccctgt |
| | SKNQVSLKLSSVTAADTAVYY | cttgcagagcctcccaagacatctcaaaataccttaattgg |
| | CAKHYYYGGSYAMDYWGQG | tatcaacagaagcccggacaggctcctcgccttctgatcta |
| | TLVTVSSTTTPAPRPPTPAPTI | ccacaccagccggctccattctggaatccctgccaggttc |
| | ASQPLSLRPEACRPAAGGAV | agcggtagcggatctgggaccgactacaccctcactatca |
| | HTRGLDFACDIYIWAPLAGTC | gctcactgcagccagaggacttcgctgtctatttctgtcagc |
| | GVLLLSLVITLYCKRGRKKLLYI | aagggaacaccctgccctacacctttggacagggcacca |
| | FKQPFMRPVQTTQEEDGCSC | agctcgagattaaaggtggaggtggcagcggaggaggt |
| | RFPEEEEGGCELRVKFSRSA | gggtccggcggtggaggaagccaggtccaactccaaga |
| | DAPAYQQGQNQLYNELNLGR | aagcggaccgggtcttgtgaagccatcagaaactctttca |
| | REEYDVLDKRRGRDPEMGGK | ctgacttgtactgtgagcggagtgtctctccccgattacggg |
| | PRRKNPQEGLYNELQKDKMA | gtgtcttggatcagacagccaccggggaagggtctggaat |
| | EAYSEIGMKGERRRGKGHDG | ggattggagtgatttggggctctgagactacttactactcttc |
| | LYQGLSTATKDTYDALHMQAL | atccctcaagtcacgcgtcaccatctcaaaggacaactct |
| | PPR (SEQ ID NO: 1027) | aagaatcaggtgtcactgaaactgtcatctgtgaccgcag |
| | | ccgacaccgccgtgtactattgcgctaagcattactattatg |
| | | gcgggagctacgcaatggattactggggacagggtactct |
| | | ggtcaccgtgtccagcaccactaccccagcaccgaggcc |
| | | acccaccccggctcctaccatcgcctcccagcctctgtccc |
| | | tgcgtccggaggcatgtagacccgcagctggtggggccg |
| | | tgcatacccggggtcttgacttcgcctgcgatatctacatttg |
| | | ggcccctctggctggtacttgcggggtcctgctgctttcactc |
| | | gtgatcactctttactgtaagcgcggtcggaagaagctgct |
| | | gtacatctttaagcaacccttcatgaggcctgtgcagacta |
| | | ctcaagaggaggacggctgttcatgccggttcccagagg |
| | | aggaggaaggcggctgcgaactgcgcgtgaaattcagc |
| | | cgcagcgcagatgctccagcctaccagcaggggcagaa |
| | | ccagctctacaacgaactcaatcttggtcggagagagga |
| | | gtacgacgtgctggacaagcggagaggacgggaccca |
| | | gaaatgggcgggaagccgcgcagaaagaatccccaag |
| | | agggcctgtacaacgagctccaaaaggataagatggca |
| | | gaagcctatagcgagattggtatgaaaggggaacgcag |
| | | aagaggcaaaggccacgacggactgtaccagggactc |
| | | agcaccgccaccaaggacacctatgacgctcttcacatg |
| | | caggccctgccgcctcgg (SEQ ID NO: 1087) |
| SP-Linker 5- | MALPVTALLLPLALLLHAARPE | atggccctccctgtcaccgccctgctgcttccgctggctcttc |
| ERmut1-Furin | SLALSLTADQMVSALLDAEPPI | tgctccacgccgctcggcccgagtcgttggcactttccctg |
| cleavage site 3- | LYSEYDPTRPFSEASMMGLLT | actgccgaccagatggtgtccgcccttctggacgccgagc |
| CD19 CAR2 | NLADRELVHMINWAKRVPGF | ctccaattctgtactcggagtacgatccgactcgcccgttct |
| | VDLALHDQVHLLECAWMEILM | ccgaagccagcatgatgggcctgttgactaacctggcgg |
| | IGLVWRSMEHPGKLLFAPNLL | accgcgagttggtgcacatgattaactgggctaagcgggt |
| | LDRNQGKCVEGGVEIFDMLLA | gccgggcttcgtggacctggccctgcacgaccaagtgca |
| | TSSRFRMMNLQGEEFVCLKSI | cctcctggaatgcgcctggatggaaatcctcatgatcggcc |
| | ILLNSGVYTFLSSTLKSLEEKD | tcgtgtggagatccatggagcatcccggaaagctcctgttt |
| | HIHRVLDKITDTLIHLMAKAGLT | gcacccaacctcctgcttgatcgcaaccagggaaaatgc |
| | LQQQHQRLAQLLLILSHIRHM | gtggaagggggtgtcgagattttcgacatgctgctcgccac |
| | SSKRMEHLYSMKCKNVVPLS | ctcttcccggttccggatgatgaatctgcagggagaagagt |
| | DLLLEMLDAHRLGTGAEDPRP | tcgtgtgtctgaagtcaatcatcctgctgaactccggggtct |
| | SRKRREIVMTQSPATLSLSPG | ataccttcctgagctcgaccctcaagtcactggaggaaaa |
| | ERATLSCRASQDISKYLNWYQ | agaccacatccatcgcgtgctcgataagatcaccgacac |
| | QKPGQAPRLLIYHTSRLHSGIP | ccttatccatctcatggcgaaggctggactgaccctgcaac |
| | ARFSGSGSGTDYTLTISSLQP | agcagcaccagaggctggcccagttgctgctgattctgag |
| | EDFAVYFCQQGNTLPYTFGQ | ccacatccggcacatgtcgtccaagaggatggaacacct |
| | GTKLEIKGGGGSGGGGSGGG | gtacagcatgaagtgcaagaacgtcgtgcctctgtccgat |
| | GSQVQLQESGPGLVKPSETL | ctgctcctggaaatgctggacgcgcacagactcgggacg |
| | SLTCTVSGVSLPDYGVSWIRQ | ggagctgaagatccacgacccagcagaaagcgacggg |
| | PPGKGLEWIGVIWGSETTYYS | aaattgtgatgacccagtcacccgccactcttagcctttcac |
| | SSLKSRVTISKDNSKNQVSLK | ccggtgagcgcgcaaccctgtcttgcagagcctcccaag |
| | LSSVTAADTAVYYCAKHYYYG | acatctcaaaataccttaattggtatcaacagaagcccgg |
| | GSYAMDYWGQGTLVTVSSTT | acaggctcctcgccttctgatctaccacaccagccggctcc |
| | TPAPRPPTPAPTIASQPLSLRP | attctggaatccctgccaggttcagcggtagcggatctggg |
| | EACRPAAGGAVHTRGLDFAC | accgactacaccctcactatcagctcactgcagccagag |
| | DIYIWAPLAGTCGVLLLSLVITL | gacttcgctgtctatttctgtcagcaagggaacaccctgccc |
| | YCKRGRKKLLYIFKQPFMRPV | tacacctttggacagggcaccaagctcgagattaaaggtg |
| | QTTQEEDGCSCRFPEEEEGG | gaggtggcagcggaggaggtgggtccggcggtggagg |
| | CELRVKFSRSADAPAYQQGQ | aagccaggtccaactccaagaaagcggaccgggtcttgt |
| | NQLYNELNLGRREEYDVLDK | gaagccatcagaaactctttcactgacttgtactgtgagcg |
| | RRGRDPEMGGKPRRKNPQE | gagtgtctctccccgattacggggtgtcttggatcagacag |
| | GLYNELQKDKMAEAYSEIGMK | ccaccggggaagggtctggaatggattggagtgatttggg |
| | GERRRGKGHDGLYQGLSTAT | gctctgagactacttactactcttcatccctcaagtcacgcgt |
| | KDTYDALHMQALPPR | caccatctcaaaggacaactctaagaatcaggtgtcactg |
| | (SEQ ID NO: 1028) | aaactgtcatctgtgaccgcagccgacaccgccgtgtact |
| | | attgcgctaagcattactattatggcgggagctacgcaatg |
| | | gattactggggacagggtactctggtcaccgtgtccagca |
| | | ccactaccccagcaccgaggccacccaccccggctccta |
| | | ccatcgcctcccagcctctgtccctgcgtccggaggcatgt |
| | | agacccgcagctggtggggccgtgcatacccggggtctt |
| | | gacttcgcctgcgatatctacatttgggcccctctggctggta |
| | | cttgcggggtcctgctgctttcactcgtgatcactctttactgta |
| | | agcgcggtcggaagaagctgctgtacatctttaagcaacc |
| | | cttcatgaggcctgtgcagactactcaagaggaggacgg |
| | | ctgttcatgccggttcccagaggaggaggaaggcggctg |
| | | cgaactgcgcgtgaaattcagccgcagcgcagatgctcc |
| | | agcctaccagcaggggcagaaccagctctacaacgaac |
| | | tcaatcttggtcggagagaggagtacgacgtgctggaca |
| | | agcggagaggacgggacccagaaatgggcgggaagc |
| | | cgcgcagaaagaatccccaagagggcctgtacaacga |
| | | gctccaaaaggataagatggcagaagcctatagcgaga |
| | | ttggtatgaaaggggaacgcagaagaggcaaaggcca |
| | | cgacggactgtaccagggactcagcaccgccaccaagg |
| | | acacctatgacgctcttcacatgcaggccctgccgcctcg |
| | | g (SEQ ID NO: 1088) |
| SP-Linker 5- | MALPVTALLLPLALLLHAARPE | atggccctccctgtcaccgccctgctgcttccgctggctcttc |
| ERmut2-Furin | SLALSLTADQMVSALLDAEPPI | tgctccacgccgctcggcccgagTcgttggcactttccctg |
| cleavage site 3- | LYSEYDPTRPFSEASMMGLLT | actgccgaccagatggtgtccgcccttctggacgccgagc |
| CD19 CAR2 | NLADRELVHMINWAKRVPGF | ctccaattctgtactcggagtacgatccgactcgcccgttct |
| | VDLTLHDQVHLLECAWMEILM | ccgaagccagcatgatgggcctgttgactaacctggcgg |
| | IGLVWRSMEHPGKLLFAPNLL | accgcgagttggtgcacatgattaactgggctaagcgggt |
| | LDRNQGKCVEGGVEIFDMLLA | gccgggcttcgtggacctgaccctgcacgaccaagtgca |
| | TSSRFRMMNLQGEEFVCLKSI | cctcctggaatgcgcctggatggaaatcctcatgatcggcc |
| | ILLNSGVYTFLSSTLKSLEEKD | tcgtgtggagatccatggagcatcccggaaagctcctgttt |
| | HIHRVLDKITDTLIHLMAKAGLT | gcacccaacctcctgcttgatcgcaaccagggaaaatgc |
| | LQQQHQRLAQLLLILSHIRHM | gtggaagggggtgtcgagattttcgacatgctgctcgccac |
| | SNKRMEHLYSMKCKNVVPLS | ctcttcccggttccggatgatgaatctgcagggagaagagt |
| | DLLLEMLDAHRLGTGAEDPRP | tcgtgtgtctgaagtcaatcatcctgctgaactccggggtct |
| | SRKRREIVMTQSPATLSLSPG | ataccttcctgagctcgaccctcaagtcactggaggaaaa |
| | ERATLSCRASQDISKYLNWYQ | agaccacatccatcgcgtgctcgataagatcaccgacac |
| | QKPGQAPRLLIYHTSRLHSGIP | ccttatccatctcatggcgaaggctggactgaccctgcaac |
| | ARFSGSGSGTDYTLTISSLQP | agcagcaccagaggctggcccagttgctgctgattctgag |
| | EDFAVYFCQQGNTLPYTFGQ | ccacatccggcacatgtcgaacaagaggatggaacacc |
| | GTKLEIKGGGGSGGGGSGGG | tgtacagcatgaagtgcaagaacgtcgtgcctctgtccgat |
| | GSQVQLQESGPGLVKPSETL | ctgctcctggaaatgctggacgcgcacagactcGggacg |
| | SLTCTVSGVSLPDYGVSWIRQ | ggagctgaagatccacgacccagcagaaagcgacggg |
| | PPGKGLEWIGVIWGSETTYYS | aaattgtgatgacccagtcacccgccactcttagcctttcac |
| | SSLKSRVTISKDNSKNQVSLK | ccggtgagcgcgcaaccctgtcttgcagagcctcccaag |
| | LSSVTAADTAVYYCAKHYYYG | acatctcaaaataccttaattggtatcaacagaagcccgg |
| | GSYAMDYWGQGTLVTVSSTT | acaggctcctcgccttctgatctaccacaccagccggctcc |
| | TPAPRPPTPAPTIASQPLSLRP | attctggaatccctgccaggttcagcggtagcggatctggg |
| | EACRPAAGGAVHTRGLDFAC | accgactacaccctcactatcagctcactgcagccagag |
| | DIYIWAPLAGTCGVLLLSLVITL | gacttcgctgtctatttctgtcagcaagggaacaccctgccc |
| | YCKRGRKKLLYIFKQPFMRPV | tacacctttggacagggcaccaagctcgagattaaaggtg |
| | QTTQEEDGCSCRFPEEEEGG | gaggtggcagcggaggaggtgggtccggcggtggagg |
| | CELRVKFSRSADAPAYQQGQ | aagccaggtccaactccaagaaagcggaccgggtcttgt |
| | NQLYNELNLGRREEYDVLDK | gaagccatcagaaactctttcactgacttgtactgtgagcg |
| | RRGRDPEMGGKPRRKNPQE | gagtgtctctccccgattacggggtgtcttggatcagacag |
| | GLYNELQKDKMAEAYSEIGMK | ccaccggggaagggtctggaatggattggagtgatttggg |
| | GERRRGKGHDGLYQGLSTAT | gctctgagactacttactactcttcatccctcaagtcacgcgt |
| | KDTYDALHMQALPPR | caccatctcaaaggacaactctaagaatcaggtgtcactg |
| | (SEQ ID NO: 1029) | aaactgtcatctgtgaccgcagccgacaccgccgtgtact |
| | | attgcgctaagcattactattatggcgggagctacgcaatg |
| | | gattactggggacagggtactctggtcaccgtgtccagca |
| | | ccactaccccagcaccgaggccacccaccccggctccta |
| | | ccatcgcctcccagcctctgtccctgcgtccggaggcatgt |
| | | agacccgcagctggtggggccgtgcatacccggggtctt |
| | | gacttcgcctgcgatatctacatttgggcccctctggctggta |
| | | cttgcggggtcctgctgctttcactcgtgatcactctttactgta |
| | | agcgcggtcggaagaagctgctgtacatctttaagcaacc |
| | | cttcatgaggcctgtgcagactactcaagaggaggacgg |
| | | ctgttcatgccggttcccagaggaggaggaaggcggctg |
| | | cgaactgcgcgtgaaattcagccgcagcgcagatgctcc |
| | | agcctaccagcaggggcagaaccagctctacaacgaac |
| | | tcaatcttggtcggagagaggagtacgacgtgctggaca |
| | | agcggagaggacgggacccagaaatgggcgggaagc |
| | | cgcgcagaaagaatccccaagagggcctgtacaacga |
| | | gctccaaaaggataagatggcagaagcctatagcgaga |
| | | ttggtatgaaaggggaacgcagaagaggcaaaggcca |
| | | cgacggactgtaccagggactcagcaccgccaccaagg |
| | | acacctatgacgctcttcacatgcaggccctgccgcctcg |
| | | g (SEQ ID NO: 1089) |
| SP-Linker 5- | MALPVTALLLPLALLLHAARPE | atggccctccctgtcaccgccctgctgcttccgctggctcttc |
| ERmut1-Furin | SLALSLTADQMVSALLDAEPPI | tgctccacgccgctcggcccgagtcgttggcactttccctg |
| cleavage site 2- | LYSEYDPTRPFSEASMMGLLT | actgccgaccagatggtgtccgcccttctggacgccgagc |
| CD123 CAR | NLADRELVHMINWAKRVPGF | ctccaattctgtactcggagtacgatccgactcgcccgttct |
| | VDLALHDQVHLLECAWMEILM | ccgaagccagcatgatgggcctgttgactaacctggcgg |
| | IGLVWRSMEHPGKLLFAPNLL | accgcgagttggtgcacatgattaactgggctaagcgggt |
| | LDRNQGKCVEGGVEIFDMLLA | gccgggcttcgtggacctggccctgcacgaccaagtgca |
| | TSSRFRMMNLQEEFVCLKSI | cctcctggaatgcgcctggatggaaatcctcatgatcggcc |
| | ILLNSGVYTFLSSTLKSLEEKD | tcgtgtggagatccatggagcatcccggaaagctcctgttt |
| | HIHRVLDKITDTLIHLMAKAGLT | gcacccaacctcctgcttgatcgcaaccagggaaaatgc |
| | LQQQHQRLAQLLLILSHIRHM | gtggaagggggtgtcgagattttcgacatgctgctcgccac |
| | SSKRMEHLYSMKCKNVVPLS | ctcttcccggttccggatgatgaatctgcagggagaagagt |
| | DLLLEMLDAHRLGTGAEDPRP | tcgtgtgtctgaagtcaatcatcctgctgaactccggggtct |
| | SRKRRSLGDVGQVQLVQSGA | ataccttcctgagctcgaccctcaagtcactggaggaaaa |
| | EVKKPGASVKVSCKASGYTFT | agaccacatccatcgcgtgctcgataagatcaccgacac |
| | GYYMHWVRQAPGQGLEWM | ccttatccatctcatggcgaaggctggactgaccctgcaac |
| | GWINPNSGGTNYAQKFQGRV | agcagcaccagaggctggcccagttgctgctgattctgag |
| | TLTRDTSISTVYMELSRLRSD | ccacatccggcacatgtcgtccaagaggatggaacacct |
| | DTAVYYCARDMNILATVPFDI | gtacagcatgaagtgcaagaacgtcgtgcctctgtccgat |
| | WGQGTMVTVSSGGGGSGGG | ctgctcctggaaatgctggacgcgcacagactcggaacc |
| | GSGGGGSDIQMTQSPSSLSA | ggcgcggaagacccccggccctccaggaagcgaaggt |
| | SVGDRVTITCRASQSISSYLN | ccctcggagacgtgggtcaagtgcaactcgtccaaagcg |
| | WYQQKPGKAPKLLIYAASSLQ | gagcggaagtcaagaaacccggagcgagcgtgaaagt |
| | SGVPSRFSGSGSGTDFTLTV | gtcctgcaaagcctccggctacacctttacgggctactaca |
| | NSLQPEDFATYYCQQGDSVP | tgcactgggtgcgccaggcaccaggacagggtcttgaat |
| | LTFGGGTRLEIKTTTPAPRPPT | ggatgggatggatcaaccctaattcgggcggaactaacta |
| | PAPTIASQPLSLRPEACRPAA | cgcacagaagttccaggggagagtgactctgactcggga |
| | GGAVHTRGLDFACDIYIWAPL | tacctccatctcaactgtctacatggaactctcccgcttgcg |
| | AGTCGVLLLSLVITLYCKRGRK | gtcagatgatacggcagtgtactactgcgcccgcgacatg |
| | KLLYIFKQPFMRPVQTTQEED | aatatcctggctaccgtgccgttcgacatctggggacagg |
| | GCSCRFPEEEEGGCELRVKF | ggactatggttactgtctcatcgggcggtggaggttcagga |
| | SRSADAPAYQQGQNQLYNEL | ggaggcggctcgggaggcggaggttcggacattcagat |
| | NLGRREEYDVLDKRRGRDPE | gacccagtccccatcctctctgtcggccagcgtcggagat |
| | MGGKPRRKNPQEGLYNELQK | agggtgaccattacctgtcgggcctcgcaaagcatctcctc |
| | DKMAEAYSEIGMKGERRRGK | gtacctcaactggtatcagcaaaagccgggaaaggcgc |
| | GHDGLYQGLSTATKDTYDAL | ctaagctgctgatctacgccgcttcgagcttgcaaagcgg |
| | HMQALPPR (SEQ ID | ggtgccatccagattctcgggatcaggctcaggaaccga |
| | NO: 1030) | cttcaccctgaccgtgaacagcctccagccggaggacttt |
| | | gccacttactactgccagcagggagactccgtgccgctta |
| | | ctttcggggggggtacccgcctggagatcaagaccacta |
| | | ccccagcaccgaggccacccaccccggctcctaccatcg |
| | | cctcccagcctctgtccctgcgtccggaggcatgtagaccc |
| | | gcagctggtggggccgtgcatacccggggtcttgacttcg |
| | | cctgcgatatctacatttgggcccctctggctggtacttgcgg |
| | | ggtcctgctgctttcactcgtgatcactctttactgtaagcgcg |
| | | gtcggaagaagctgctgtacatctttaagcaacccttcatg |
| | | aggcctgtgcagactactcaagaggaggacggctgttcat |
| | | gccggttcccagaggaggaggaaggcggctgcgaactg |
| | | cgcgtgaaattcagccgcagcgcagatgctccagcctac |
| | | cagcaggggcagaaccagctctacaacgaactcaatctt |
| | | ggtcggagagaggagtacgacgtgctggacaagcgga |
| | | gaggacgggacccagaaatgggcgggaagccgcgca |
| | | gaaagaatccccaagagggcctgtacaacgagctccaa |
| | | aaggataagatggcagaagcctatagcgagattggtatg |
| | | aaaggggaacgcagaagaggcaaaggccacgacgg |
| | | actgtaccagggactcagcaccgccaccaaggacacct |
| | | atgacgctcttcacatgcaggccctgccgcctcgg (SEQ ID |
| | | NO: 1090) |
| SP-Linker 5- | MALPVTALLLPLALLLHAARPE | atggccctccctgtcaccgccctgctgcttccgctggctcttc |
| ERmut2-Furin | SLALSLTADQMVSALLDAEPPI | tgctccacgccgctcggcccgagTcgttggcactttccctg |
| cleavage site 2- | LYSEYDPTRPFSEASMMGLLT | actgccgaccagatggtgtccgcccttctggacgccgagc |
| CD123 CAR | NLADRELVHMINWAKRVPGF | ctccaattctgtactcggagtacgatccgactcgcccgttct |
| | VDLTLHDQVHLLECAWMEILM | ccgaagccagcatgatgggcctgttgactaacctggcgg |
| | IGLVWRSMEHPGKLLFAPNLL | accgcgagttggtgcacatgattaactgggctaagcgggt |
| | LDRNQGKCVEGGVEIFDMLLA | gccgggcttcgtggacctgaccctgcacgaccaagtgca |
| | TSSRFRMMNLQGEEFVCLKSI | cctcctggaatgcgcctggatggaaatcctcatgatcggcc |
| | ILLNSGVYTFLSSTLKSLEEKD | tcgtgtggagatccatggagcatcccggaaagctcctgttt |
| | HIHRVLDKITDTLIHLMAKAGLT | gcacccaacctcctgcttgatcgcaaccagggaaaatgc |
| | LQQQHQRLAQLLLILSHIRHM | gtggaagggggtgtcgagattttcgacatgctgctcgccac |
| | SNKRMEHLYSMKCKNVVPLS | ctcttcccggttccggatgatgaatctgcagggagaagagt |
| | DLLLEMLDAHRLGTGAEDPRP | tcgtgtgtctgaagtcaatcatcctgctgaactccggggtct |
| | SRKRRSLGDVGQVQLVQSGA | ataccttcctgagctcgaccctcaagtcactggaggaaaa |
| | EVKKPGASVKVSCKASGYTFT | agaccacatccatcgcgtgctcgataagatcaccgacac |
| | GYYMHWVRQAPGQGLEWM | ccttatccatctcatggcgaaggctggactgaccctgcaac |
| | GWINPNSGGTNYAQKFQGRV | agcagcaccagaggctggcccagttgctgctgattctgag |
| | TLTRDTSISTVYMELSRLRSD | ccacatccggcacatgtcgaacaagaggatggaacacc |
| | DTAVYYCARDMNILATVPFDI | tgtacagcatgaagtgcaagaacgtcgtgcctctgtccgat |
| | WGQGTMVTVSSGGGGSGGG | ctgctcctggaaatgctggacgcgcacagactcggaacc |
| | GSGGGGSDIQMTQSPSSLSA | ggcgcggaagacccccggccctccaggaagcgaaggt |
| | SVGDRVTITCRASQSISSYLN | ccctcggagacgtgggtcaagtgcaactcgtccaaagcg |
| | WYQQKPGKAPKLLIYAASSLQ | gagcggaagtcaagaaacccggagcgagcgtgaaagt |
| | SGVPSRFSGSGSGTDFTLTV | gtcctgcaaagcctccggctacacctttacgggctactaca |
| | NSLQPEDFATYYCQQGDSVP | tgcactgggtgcgccaggcaccaggacagggtcttgaat |
| | LTFGGGTRLEIKTTTPAPRPPT | ggatgggatggatcaaccctaattcgggcggaactaacta |
| | PAPTIASQPLSLRPEACRPAA | cgcacagaagttccaggggagagtgactctgactcggga |
| | GGAVHTRGLDFACDIYIWAPL | tacctccatctcaactgtctacatggaactctcccgcttgcg |
| | AGTCGVLLLSLVITLYCKRGRK | gtcagatgatacggcagtgtactactgcgcccgcgacatg |
| | KLLYIFKQPFMRPVQTTQEED | aatatcctggctaccgtgccgttcgacatctggggacagg |
| | GCSCRFPEEEEGGCELRVKF | ggactatggttactgtctcatcgggcggtggaggttcagga |
| | SRSADAPAYQQGQNQLYNEL | ggaggcggctcgggaggcggaggttcggacattcagat |
| | NLGRREEYDVLDKRRGRDPE | gacccagtccccatcctctctgtcggccagcgtcggagat |
| | MGGKPRRKNPQEGLYNELQK | agggtgaccattacctgtcgggcctcgcaaagcatctcctc |
| | DKMAEAYSEIGMKGERRRGK | gtacctcaactggtatcagcaaaagccgggaaaggcgc |
| | GHDGLYQGLSTATKDTYDAL | ctaagctgctgatctacgccgcttcgagcttgcaaagcgg |
| | HMQALPPR (SEQ ID NO: | ggtgccatccagattctcgggatcaggctcaggaaccga |
| | 1031) | cttcaccctgaccgtgaacagcctccagccggaggacttt |
| | | gccacttactactgccagcagggagactccgtgccgctta |
| | | ctttcggggggggtacccgcctggagatcaagaccacta |
| | | ccccagcaccgaggccacccaccccggctcctaccatcg |
| | | cctcccagcctctgtccctgcgtccggaggcatgtagaccc |
| | | gcagctggtggggccgtgcatacccggggtcttgacttcg |
| | | cctgcgatatctacatttgggcccctctggctggtacttgcgg |
| | | ggtcctgctgctttcactcgtgatcactctttactgtaagcgcg |
| | | gtcggaagaagctgctgtacatctttaagcaacccttcatg |
| | | aggcctgtgcagactactcaagaggaggacggctgttcat |
| | | gccggttcccagaggaggaggaaggcggctgcgaactg |
| | | cgcgtgaaattcagccgcagcgcagatgctccagcctac |
| | | cagcaggggcagaaccagctctacaacgaactcaatctt |
| | | ggtcggagagaggagtacgacgtgctggacaagcgga |
| | | gaggacgggacccagaaatgggcgggaagccgcgca |
| | | gaaagaatccccaagagggcctgtacaacgagctccaa |
| | | aaggataagatggcagaagcctatagcgagattggtatg |
| | | aaaggggaacgcagaagaggcaaaggccacgacgg |
| | | actgtaccagggactcagcaccgccaccaaggacacct |
| | | atgacgctcttcacatgcaggccctgccgcctcgg |
| | | (SEQ ID NO: 1091) |
| SP-Linker 5- | MALPVTALLLPLALLLHAARPE | atggccctccctgtcaccgccctgctgcttccgctggctcttc |
| ERmut1-Furin | SLALSLTADQMVSALLDAEPPI | tgctccacgccgctcggcccgagtcgttggcactttccctga |
| cleavage site 3- | LYSEYDPTRPFSEASMMGLLT | ctgccgaccagatggtgtccgcccttctggacgccgagcct |
| CD123 CAR | NLADRELVHMINWAKRVPGF | ccaattctgtactcggagtacgatccgactcgcccgttctcc |
| | VDLALHDQVHLLECAWMEILM | gaagccagcatgatgggcctgttgactaacctggcggacc |
| | IGLVWRSMEHPGKLLFAPNLL | gcgagttggtgcacatgattaactgggctaagcgggtgccg |
| | LDRNQGKCVEGGVEIFDMLLA | ggcttcgtggacctggccctgcacgaccaagtgcacctcct |
| | TSSRFRMMNLQGEEFVCLKSI | ggaatgcgcctggatggaaatcctcatgatcggcctcgtgt |
| | ILLNSGVYTFLSSTLKSLEEKD | ggagatccatggagcatcccggaaagctcctgtttgcaccc |
| | HIHRVLDKITDTLIHLMAKAGLT | aacctcctgcttgatcgcaaccagggaaaatgcgtggaag |
| | LQQQHQRLAQLLLILSHIRHM | ggggtgtcgagattttcgacatgctgctcgccacctcttccc |
| | SSKRMEHLYSMKCKNVVPLS | ggttccggatgatgaatctgcagggagaagagttcgtgtgt |
| | DLLLEMLDAHRLGTGAEDPRP | ctgaagtcaatcatcctgctgaactccggggtctataccttc |
| | SRKRRQVQLVQSGAEVKKPG | ctgagctcgaccctcaagtcactggaggaaaaagaccaca |
| | ASVKVSCKASGYTFTGYYMH | tccatcgcgtgctcgataagatcaccgacacccttatccatc |
| | WVRQAPGQGLEWMGWINPN | tcatggcgaaggctggactgaccctgcaacagcagcacca |
| | SGGTNYAQKFQGRVTLTRDT | gaggctggcccagttgctgctgattctgagccacatccggc |
| | SISTVYMELSRLRSDDTAVYY | acatgtcgtccaagaggatggaacacctgtacagcatgaa |
| | CARDMNILATVPFDIWGQGTM | gtgcaagaacgtcgtgcctctgtccgatctgctcctggaaat |
| | VTVSSGGGGSGGGGSGGGG | gctggacgcgcacagactcggaaccggcgcggaagaccc |
| | SDIQMTQSPSSLSASVGDRVT | ccggccctccaggaagcgaaggcaagtgcaactcgtccaa |
| | ITCRASQSISSYLNWYQQKPG | agcggagcggaagtcaagaaacccggagcgagcgtgaaa |
| | KAPKLLIYAASSLQSGVPSRFS | gtgtcctgcaaagcctccggctacacctttacgggctactac |
| | GSGSGTDFTLTVNSLQPEDFA | atgcactgggtgcgccaggcaccaggacagggtcttgaat |
| | TYYCQQGDSVPLTFGGGTRL | ggatgggatggatcaaccctaattcgggcggaactaacta |
| | EIKTTTPAPRPPTPAPTIASQP | cgcacagaagttccaggggagagtgactctgactcgggat |
| | LSLRPEACRPAAGGAVHTR | acctccatctcaactgtctacatggaactctcccgcttgcgg |
| | GLDFACDIYIWAPLAGTCG | tcagatgatacggcagtgtactactgcgcccgcgacatgaa |
| | VLLLSLVITLYCKRGRKKLL | tatcctggctaccgtgccgttcgacatctggggacagggga |
| | YIFKQPFMRPVQTTQEEDG | ctatggttactgtctcatcgggcggtggaggttcaggagga |
| | CSCRFPEEEEGGCELRVK | ggcggctcgggaggcggaggttcggacattcagatgaccc |
| | FSRSADAPAYQQGQNQLY | agtccccatcctctctgtcggccagcgtcggagatagggtg |
| | NELNLGRREEYDVLDKRR | accattacctgtcgggcctcgcaaagcatctcctcgtacctc |
| | GRDPEMGGKPRRKNPQE | aactggtatcagcaaaagccgggaaaggcgcctaagctgc |
| | GLYNELQKDKMAEAYSEIG | tgatctacgccgcttcgagcttgcaaagcggggtgccatcc |
| | MKGERRRGKGHDGLYQGL | agattctcgggatcaggctcaggaaccgacttcaccctgac |
| | STATKDTYDALHMQALPPR | cgtgaacagcctccagccggaggactttgccacttactact |
| | (SEQ ID NO: 1032) | gccagcagggagactccgtgccgcttactttcggggggggt |
| | | acccgcctggagatcaagaccactaccccagcaccgaggc |
| | | cacccaccccggctcctaccatcgcctcccagcctctgtccc |
| | | tgcgtccggaggcatgtagacccgcagctggtggggccgt |
| | | gcatacccggggtcttgacttcgcctgcgatatctacatttg |
| | | ggcccctctggctggtacttgcggggtcctgctgctttcactc |
| | | gtgatcactctttactgtaagcgcggtcggaagaagctgct |
| | | gtacatctttaagcaacccttcatgaggcctgtgcagactac |
| | | tcaagaggaggacggctgttcatgccggttcccagaggag |
| | | gaggaaggcggctgcgaactgcgcgtgaaattcagccgca |
| | | gcgcagatgctccagcctaccagcaggggcagaaccagct |
| | | ctacaacgaactcaatcttggtcggagagaggagtacgac |
| | | gtgctggacaagcggagaggacgggacccagaaatgggc |
| | | gggaagccgcgcagaaagaatccccaagagggcctgtac |
| | | aacgagctccaaaaggataagatggcagaagcctatagc |
| | | gagattggtatgaaaggggaacgcagaagaggcaaaggc |
| | | cacgacggactgtaccagggactcagcaccgccaccaagg |
| | | acacctatgacgctcttcacatgcaggccctgccgcctcgg |
| | | (SEQ ID NO: 1092) |
| SP-Linker 5- | MALPVTALLLPLALLLHAARPE | atggccctccctgtcaccgccctgctgcttccgctggctcttc |
| ERmut2-Furin | SLALSLTADQMVSALLDAEPPI | tgctccacgccgctcggcccgagTcgttggcactttccctg |
| cleavage site 3- | LYSEYDPTRPFSEASMMGLLT | actgccgaccagatggtgtccgcccttctggacgccgagc |
| CD123 CAR | NLADRELVHMINWAKRVPGF | ctccaattctgtactcggagtacgatccgactcgcccgttct |
| | VDLTLHDQVHLLECAWMEILM | ccgaagccagcatgatgggcctgttgactaacctggcgg |
| | IGLVWRSMEHPGKLLFAPNLL | accgcgagttggtgcacatgattaactgggctaagcgggt |
| | LDRNQGKCVEGGVEIFDMLLA | gccgggcttcgtggacctgaccctgcacgaccaagtgca |
| | TSSRFRMMNLQGEEFVCLKSI | cctcctggaatgcgcctggatggaaatcctcatgatcggcc |
| | ILLNSGVYTFLSSTLKSLEEKD | tcgtgtggagatccatggagcatcccggaaagctcctgttt |
| | HIHRVLDKITDTLIHLMAKAGLT | gcacccaacctcctgcttgatcgcaaccagggaaaatgc |
| | LQQQHQRLAQLLLILSHIRHM | gtggaagggggtgtcgagattttcgacatgctgctcgccac |
| | SNKRMEHLYSMKCKNVVPLS | ctcttcccggttccggatgatgaatctgcagggagaagagt |
| | DLLLEMLDAHRLGTGAEDPRP | tcgtgtgtctgaagtcaatcatcctgctgaactccggggtct |
| | SRKRRQVQLVQSGAEVKKPG | ataccttcctgagctcgaccctcaagtcactggaggaaaa |
| | ASVKVSCKASGYTFTGYYMH | agaccacatccatcgcgtgctcgataagatcaccgacac |
| | WVRQAPGQGLEWMGWINPN | ccttatccatctcatggcgaaggctggactgaccctgcaac |
| | SGGTNYAQKFQGRVTLTRDT | agcagcaccagaggctggcccagttgctgctgattctgag |
| | SISTVYMELSRLRSDDTAVYY | ccacatccggcacatgtcgaacaagaggatggaacacc |
| | CARDMNILATVPFDIWGQGTM | tgtacagcatgaagtgcaagaacgtcgtgcctctgtccgat |
| | VTVSSGGGGSGGGGSGGGG | ctgctcctggaaatgctggacgcgcacagactcgggacg |
| | SDIQMTQSPSSLSASVGDRVT | ggagctgaagatccacgacccagcagaaagcgacggc |
| | ITCRASQSISSYLNWYQQKPG | aagtgcaactcgtccaaagcggagcggaagtcaagaaa |
| | KAPKLLIYAASSLQSGVPSRFS | cccggagcgagcgtgaaagtgtcctgcaaagcctccggc |
| | GSGSGTDFTLTVNSLQPEDFA | tacacctttacgggctactacatgcactgggtgcgccaggc |
| | TYYCQQGDSVPLTFGGGTRL | accaggacagggtcttgaatggatgggatggatcaaccct |
| | EIKTTTPAPRPPTPAPTIASQP | aattcgggcggaactaactacgcacagaagttccagggg |
| | LSLRPEACRPAAGGAVHTRG | agagtgactctgactcgggatacctccatctcaactgtctac |
| | LDFACDIYIWAPLAGTCGVLLL | atggaactctcccgcttgcggtcagatgatacggcagtgta |
| | SLVITLYCKRGRKKLLYIFKQP | ctactgcgcccgcgacatgaatatcctggctaccgtgccgt |
| | FMRPVQTTQEEDGCSCRFPE | tcgacatctggggacaggggactatggttactgtctcatcg |
| | EEEGGCELRVKFSRSADAPA | ggcggtggaggttcaggaggaggcggctcgggaggcg |
| | YQQGQNQLYNELNLGRREEY | gaggttcggacattcagatgacccagtccccatcctctctgt |
| | DVLDKRRGRDPEMGGKPRRK | cggccagcgtcggagatagggtgaccattacctgtcggg |
| | NPQEGLYNELQKDKMAEAYS | cctcgcaaagcatctcctcgtacctcaactggtatcagcaa |
| | EIGMKGERRRGKGHDGLYQG | aagccgggaaaggcgcctaagctgctgatctacgccgct |
| | LSTATKDTYDALHMQALPPR | tcgagcttgcaaagcggggtgccatccagattctcgggat |
| | (SEQ ID NO: 1033) | caggctcaggaaccgacttcaccctgaccgtgaacagcc |
| | | tccagccggaggactttgccacttactactgccagcaggg |
| | | agactccgtgccgcttactttcggggggggtacccgcctgg |
| | | agatcaagaccactaccccagcaccgaggccacccacc |
| | | ccggctcctaccatcgcctcccagcctctgtccctgcgtccg |
| | | gaggcatgtagacccgcagctggtggggccgtgcatacc |
| | | cggggtcttgacttcgcctgcgatatctacatttgggcccctc |
| | | tggctggtacttgcggggtcctgctgctttcactcgtgatcac |
| | | tctttactgtaagcgcggtcggaagaagctgctgtacatcttt |
| | | aagcaacccttcatgaggcctgtgcagactactcaagag |
| | | gaggacggctgttcatgccggttcccagaggaggaggaa |
| | | ggcggctgcgaactgcgcgtgaaattcagccgcagcgc |
| | | agatgctccagcctaccagcaggggcagaaccagctcta |
| | | caacgaactcaatcttggtcggagagaggagtacgacgt |
| | | gctggacaagcggagaggacgggacccagaaatgggc |
| | | gggaagccgcgcagaaagaatccccaagagggcctgt |
| | | acaacgagctccaaaaggataagatggcagaagcctat |
| | | agcgagattggtatgaaaggggaacgcagaagaggca |
| | | aaggccacgacggactgtaccagggactcagcaccgcc |
| | | accaaggacacctatgacgctcttcacatgcaggccctgc |
| | | cgcctcgg (SEQ ID NO: 1093) |
| SP-Linker 5- | MALPVTALLLPLALLLHAARPE | atggccctccctgtcaccgccctgctgcttccgctggctcttc |
| ERmut1-Furin | SLALSLTADQMVSALLDAEPPI | tgctccacgccgctcggcccgagTcgttggcactttccctg |
| cleavage site 2- | LYSEYDPTRPFSEASMMGLLT | actgccgaccagatggtgtccgcccttctggacgccgagc |
| BCMA CAR | NLADRELVHMINWAKRVPGF | ctccaattctgtactcggagtacgatccgactcgcccgttct |
| | VDLALHDQVHLLECAWMEILM | ccgaagccagcatgatgggcctgttgactaacctggcgg |
| | IGLVWRSMEHPGKLLFAPNLL | accgcgagttggtgcacatgattaactgggctaagcgggt |
| | LDRNQGKCVEGGVEIFDMLLA | gccgggcttcgtggacctggccctgcacgaccaagtgca |
| | TSSRFRMMNLQGEEFVCLKSI | cctcctggaatgcgcctggatggaaatcctcatgatcggcc |
| | ILLNSGVYTFLSSTLKSLEEKD | tcgtgtggagatccatggagcatcccggaaagctcctgttt |
| | HIHRVLDKITDTLIHLMAKAGLT | gcacccaacctcctgcttgatcgcaaccagggaaaatgc |
| | LQQQHQRLAQLLLILSHIRHM | gtggaagggggtgtcgagattttcgacatgctgctcgccac |
| | SSKRMEHLYSMKCKNVVPLS | ctcttcccggttccggatgatgaatctgcagggagaagagt |
| | DLLLEMLDAHRLGTGAEDPRP | tcgtgtgtctgaagtcaatcatcctgctgaactccggggtct |
| | SRKRRSLGDVGEVQLVESGG | ataccttcctgagctcgaccctcaagtcactggaggaaaa |
| | GLVQPGGSLRLSCAVSGFALS | agaccacatccatcgcgtgctcgataagatcaccgacac |
| | NHGMSWVRRAPGKGLEWVS | ccttatccatctcatggcgaaggctggactgaccctgcaac |
| | GIVYSGSTYYAASVKGRFTISR | agcagcaccagaggctggcccagttgctgctgattctgag |
| | DNSRNTLYLQMNSLRPEDTAI | ccacatccggcacatgtcgtccaagaggatggaacacct |
| | YYCSAHGGESDVWGQGTTVT | gtacagcatgaagtgcaagaacgtcgtgcctctgtccgat |
| | VSSASGGGGSGGRASGGGG | ctgctcctggaaatgctggacgcgcacagactcggaacc |
| | SDIQLTQSPSSLSASVGDRVTI | ggcgcggaagacccccggccctccaggaagcgaaggt |
| | TCRASQSISSYLNWYQQKPG | ccctcggagacgtgggtgaagtgcaattggtggaatcag |
| | KAPKLLIYAASSLQSGVPSRFS | ggggaggacttgtgcagcctggaggatcgctgagactgtc |
| | GSGSGTDFTLTISSLQPEDFA | atgtgccgtgtccggctttgccctgtccaaccacgggatgtc |
| | TYYCQQSYSTPYTFGQGTKV | ctgggtccgccgcgcgcctggaaagggcctcgaatgggt |
| | EIKTTTPAPRPPTPAPTIASQP | gtcgggtattgtgtacagcggtagcacctactatgccgcat |
| | LSLRPEACRPAAGGAVHTRG | ccgtgaaggggagattcaccatcagccgggacaactcc |
| | LDFACDIYIWAPLAGTCGVLLL | aggaacactctgtacctccaaatgaattcgctgaggccag |
| | SLVITLYCKRGRKKLLYIFKQP | aggacactgccatctactactgctccgcgcatggcggaga |
| | FMRPVQTTQEEDGCSCRFPE | gtccgacgtctggggacaggggaccaccgtgaccgtgtc |
| | EEEGGCELRVKFSRSADAPA | tagcgcgtccggcggaggcggcagcgggggtcgggcat |
| | YQQGQNQLYNELNLGRREEY | cagggggcggcggatcggacatccagctcacccagtcc |
| | DVLDKRRGRDPEMGGKPRRK | ccgagctcgctgtccgcctccgtgggagatcgggtcacca |
| | NPQEGLYNELQKDKMAEAYS | tcacgtgccgcgccagccagtcgatttcctcctacctgaac |
| | EIGMKGERRRGKGHDGLYQG | tggtaccaacagaagcccggaaaagccccgaagcttctc |
| | LSTATKDTYDALHMQALPPR | atctacgccgcctcgagcctgcagtcaggagtgccctcac |
| | (SEQ ID NO: 1034) | ggttctccggctccggttccggtactgatttcaccctgaccat |
| | | ttcctccctgcaaccggaggacttcgctacttactactgcca |
| | | gcagtcgtactccaccccctacactttcggacaaggcacc |
| | | aaggtcgaaatcaagaccactaccccagcaccgaggcc |
| | | acccaccccggctcctaccatcgcctcccagcctctgtccc |
| | | tgcgtccggaggcatgtagacccgcagctggtggggccg |
| | | tgcatacccggggtcttgacttcgcctgcgatatctacatttg |
| | | ggcccctctggctggtacttgcggggtcctgctgctttcactc |
| | | gtgatcactctttactgtaagcgcggtcggaagaagctgct |
| | | gtacatctttaagcaacccttcatgaggcctgtgcagacta |
| | | ctcaagaggaggacggctgttcatgccggttcccagagg |
| | | aggaggaaggcggctgcgaactgcgcgtgaaattcagc |
| | | cgcagcgcagatgctccagcctaccagcaggggcagaa |
| | | ccagctctacaacgaactcaatcttggtcggagagagga |
| | | gtacgacgtgctggacaagcggagaggacgggaccca |
| | | gaaatgggcgggaagccgcgcagaaagaatccccaag |
| | | agggcctgtacaacgagctccaaaaggataagatggca |
| | | gaagcctatagcgagattggtatgaaaggggaacgcag |
| | | aagaggcaaaggccacgacggactgtaccagggactc |
| | | agcaccgccaccaaggacacctatgacgctcttcacatg |
| | | caggccctgccgcctcgg (SEQ ID NO: 1094) |
| SP-Linker 5- | MALPVTALLLPLALLLHAARPE | atggccctccctgtcaccgccctgctgcttccgctggctcttc |
| ERmut2-Furin | SLALSLTADQMVSALLDAEPPI | tgctccacgccgctcggcccgagTcgttggcactttccctg |
| cleavage site 2- | LYSEYDPTRPFSEASMMGLLT | actgccgaccagatggtgtccgcccttctggacgccgagc |
| BCMA CAR | NLADRELVHMINWAKRVPGF | ctccaattctgtactcggagtacgatccgactcgcccgttct |
| | VDLTLHDQVHLLECAWMEILM | ccgaagccagcatgatgggcctgttgactaacctggcgg |
| | IGLVWRSMEHPGKLLFAPNLL | accgcgagttggtgcacatgattaactgggctaagcgggt |
| | LDRNQGKCVEGGVEIFDMLLA | gccgggcttcgtggacctgaccctgcacgaccaagtgca |
| | TSSRFRMMNLQGEEFVCLKSI | cctcctggaatgcgcctggatggaaatcctcatgatcggcc |
| | ILLNSGVYTFLSSTLKSLEEKD | tcgtgtggagatccatggagcatcccggaaagctcctgttt |
| | HIHRVLDKITDTLIHLMAKAGLT | gcacccaacctcctgcttgatcgcaaccagggaaaatgc |
| | LQQQHQRLAQLLLILSHIRHM | gtggaagggggtgtcgagattttcgacatgctgctcgccac |
| | SNKRMEHLYSMKCKNVVPLS | ctcttcccggttccggatgatgaatctgcagggagaagagt |
| | DLLLEMLDAHRLGTGAEDPRP | tcgtgtgtctgaagtcaatcatcctgctgaactccggggtct |
| | SRKRRSLGDVGEVQLVESGG | ataccttcctgagctcgaccctcaagtcactggaggaaaa |
| | GLVQPGGSLRLSCAVSGFALS | agaccacatccatcgcgtgctcgataagatcaccgacac |
| | NHGMSWVRRAPGKGLEWVS | ccttatccatctcatggcgaaggctggactgaccctgcaac |
| | GIVYSGSTYYAASVKGRFTISR | agcagcaccagaggctggcccagttgctgctgattctgag |
| | DNSRNTLYLQMNSLRPEDTAI | ccacatccggcacatgtcgaacaagaggatggaacacc |
| | YYCSAHGGESDVWGQGTTVT | tgtacagcatgaagtgcaagaacgtcgtgcctctgtccgat |
| | VSSASGGGGSGGRASGGGG | ctgctcctggaaatgctggacgcgcacagactcggaacc |
| | SDIQLTQSPSSLSASVGDRVTI | ggcgcggaagacccccggccctccaggaagcgaaggt |
| | TCRASQSISSYLNWYQQKPG | ccctcggagacgtgggtgaagtgcaattggtggaatcag |
| | KAPKLLIYAASSLQSGVPSRFS | ggggaggacttgtgcagcctggaggatcgctgagactgtc |
| | GSGSGTDFTLTISSLQPEDFA | atgtgccgtgtccggctttgccctgtccaaccacgggatgtc |
| | TYYCQQSYSTPYTFGQGTKV | ctgggtccgccgcgcgcctggaaagggcctcgaatgggt |
| | EIKTTTPAPRPPTPAPTIASQP | gtcgggtattgtgtacagcggtagcacctactatgccgcat |
| | LSLRPEACRPAAGGAVHTRG | ccgtgaaggggagattcaccatcagccgggacaactcc |
| | LDFACDIYIWAPLAGTCGVLLL | aggaacactctgtacctccaaatgaattcgctgaggccag |
| | SLVITLYCKRGRKKLLYIFKQP | aggacactgccatctactactgctccgcgcatggcggaga |
| | FMRPVQTTQEEDGCSCRFPE | gtccgacgtctggggacaggggaccaccgtgaccgtgtc |
| | EEEGGCELRVKFSRSADAPA | tagcgcgtccggcggaggcggcagcgggggtcgggcat |
| | YQQGQNQLYNELNLGRREEY | cagggggcggcggatcggacatccagctcacccagtcc |
| | DVLDKRRGRDPEMGGKPRRK | ccgagctcgctgtccgcctccgtgggagatcgggtcacca |
| | NPQEGLYNELQKDKMAEAYS | tcacgtgccgcgccagccagtcgatttcctcctacctgaac |
| | EIGMKGERRRGKGHDGLYQG | tggtaccaacagaagcccggaaaagccccgaagcttctc |
| | LSTATKDTYDALHMQALPPR | atctacgccgcctcgagcctgcagtcaggagtgccctcac |
| | (SEQ ID NO: 1035) | ggttctccggctccggttccggtactgatttcaccctgaccat |
| | | ttcctccctgcaaccggaggacttcgctacttactactgcca |
| | | gcagtcgtactccaccccctacactttcggacaaggcacc |
| | | aaggtcgaaatcaagaccactaccccagcaccgaggcc |
| | | acccaccccggctcctaccatcgcctcccagcctctgtccc |
| | | tgcgtccggaggcatgtagacccgcagctggtggggccg |
| | | tgcatacccggggtcttgacttcgcctgcgatatctacatttg |
| | | ggcccctctggctggtacttgcggggtcctgctgctttcactc |
| | | gtgatcactctttactgtaagcgcggtcggaagaagctgct |
| | | gtacatctttaagcaacccttcatgaggcctgtgcagacta |
| | | ctcaagaggaggacggctgttcatgccggttcccagagg |
| | | aggaggaaggcggctgcgaactgcgcgtgaaattcagc |
| | | cgcagcgcagatgctccagcctaccagcaggggcagaa |
| | | ccagctctacaacgaactcaatcttggtcggagagagga |
| | | gtacgacgtgctggacaagcggagaggacgggaccca |
| | | gaaatgggcgggaagccgcgcagaaagaatccccaag |
| | | agggcctgtacaacgagctccaaaaggataagatggca |
| | | gaagcctatagcgagattggtatgaaaggggaacgcag |
| | | aagaggcaaaggccacgacggactgtaccagggactc |
| | | agcaccgccaccaaggacacctatgacgctcttcacatg |
| | | caggccctgccgcctcgg (SEQ ID NO: 1095) |
| SP-Linker 5- | MALPVTALLLPLALLLHAARPE | atggccctccctgtcaccgccctgctgcttccgctggctcttc |
| ERmut1-Furin | SLALSLTADQMVSALLDAEPPI | tgctccacgccgctcggcccgagTcgttggcactttccctg |
| cleavage site 3- | LYSEYDPTRPFSEASMMGLLT | actgccgaccagatggtgtccgcccttctggacgccgagc |
| BCMA CAR | NLADRELVHMINWAKRVPGF | ctccaattctgtactcggagtacgatccgactcgcccgttct |
| | VDLALHDQVHLLECAWMEILM | ccgaagccagcatgatgggcctgttgactaacctggcgg |
| | IGLVWRSMEHPGKLLFAPNLL | accgcgagttggtgcacatgattaactgggctaagcgggt |
| | LDRNQGKCVEGGVEIFDMLLA | gccgggcttcgtggacctggccctgcacgaccaagtgca |
| | TSSRFRMMNLQGEEFVCLKSI | cctcctggaatgcgcctggatggaaatcctcatgatcggcc |
| | ILLNSGVYTFLSSTLKSLEEKD | tcgtgtggagatccatggagcatcccggaaagctcctgttt |
| | HIHRVLDKITDTLIHLMAKAGLT | gcacccaacctcctgcttgatcgcaaccagggaaaatgc |
| | LQQQHQRLAQLLLILSHIRHM | gtggaagggggtgtcgagattttcgacatgctgctcgccac |
| | SSKRMEHLYSMKCKNVVPLS | ctcttcccggttccggatgatgaatctgcagggagaagagt |
| | DLLLEMLDAHRLGTGAEDPRP | tcgtgtgtctgaagtcaatcatcctgctgaactccggggtct |
| | SRKRREVQLVESGGGLVQPG | ataccttcctgagctcgaccctcaagtcactggaggaaaa |
| | GSLRLSCAVSGFALSNHGMS | agaccacatccatcgcgtgctcgataagatcaccgacac |
| | WVRRAPGKGLEWVSGIVYSG | ccttatccatctcatggcgaaggctggactgaccctgcaac |
| | STYYAASVKGRFTISRDNSRN | agcagcaccagaggctggcccagttgctgctgattctgag |
| | TLYLQMNSLRPEDTAIYYCSA | ccacatccggcacatgtcgtccaagaggatggaacacct |
| | HGGESDVWGQGTTVTVSSAS | gtacagcatgaagtgcaagaacgtcgtgcctctgtccgat |
| | GGGGSGGRASGGGGSDIQLT | ctgctcctggaaatgctggacgcgcacagactcGggacg |
| | QSPSSLSASVGDRVTITCRAS | ggagctgaagatccacgacccagcagaaagcgacggg |
| | QSISSYLNWYQQKPGKAPKLL | aagtgcaattggtggaatcagggggaggacttgtgcagc |
| | IYAASSLQSGVPSRFSGSGSG | ctggaggatcgctgagactgtcatgtgccgtgtccggctttg |
| | TDFTLTISSLQPEDFATYYCQ | ccctgtccaaccacgggatgtcctgggtccgccgcgcgcc |
| | QSYSTPYTFGQGTKVEIKTTT | tggaaagggcctcgaatgggtgtcgggtattgtgtacagc |
| | PAPRPPTPAPTIASQPLSLRPE | ggtagcacctactatgccgcatccgtgaaggggagattca |
| | ACRPAAGGAVHTRGLDFACDI | ccatcagccgggacaactccaggaacactctgtacctcc |
| | YIWAPLAGTCGVLLLSLVITLY | aaatgaattcgctgaggccagaggacactgccatctacta |
| | CKRGRKKLLYIFKQPFMRPVQ | ctgctccgcgcatggcggagagtccgacgtctggggaca |
| | TTQEEDGCSCRFPEEEEGGC | ggggaccaccgtgaccgtgtctagcgcgtccggcggag |
| | ELRVKFSRSADAPAYQQGQN | gcggcagcgggggtcgggcatcagggggcggcggatc |
| | QLYNELNLGRREEYDVLDKR | ggacatccagctcacccagtccccgagctcgctgtccgcc |
| | RGRDPEMGGKPRRKNPQEG | tccgtgggagatcgggtcaccatcacgtgccgcgccagc |
| | LYNELQKDKMAEAYSEIGMKG | cagtcgatttcctcctacctgaactggtaccaacagaagcc |
| | ERRRGKGHDGLYQGLSTATK | cggaaaagccccgaagcttctcatctacgccgcctcgag |
| | DTYDALHMQALPPR | cctgcagtcaggagtgccctcacggttctccggctccggtt |
| | (SEQ ID NO: 1036) | ccggtactgatttcaccctgaccatttcctccctgcaaccgg |
| | | aggacttcgctacttactactgccagcagtcgtactccacc |
| | | ccctacactttcggacaaggcaccaaggtcgaaatcaag |
| | | accactaccccagcaccgaggccacccaccccggctcct |
| | | accatcgcctcccagcctctgtccctgcgtccggaggcatg |
| | | tagacccgcagctggtggggccgtgcatacccggggtctt |
| | | gacttcgcctgcgatatctacatttgggcccctctggctggta |
| | | cttgcggggtcctgctgctttcactcgtgatcactctttactgta |
| | | agcgcggtcggaagaagctgctgtacatctttaagcaacc |
| | | cttcatgaggcctgtgcagactactcaagaggaggacgg |
| | | ctgttcatgccggttcccagaggaggaggaaggcggctg |
| | | cgaactgcgcgtgaaattcagccgcagcgcagatgctcc |
| | | agcctaccagcaggggcagaaccagctctacaacgaac |
| | | tcaatcttggtcggagagaggagtacgacgtgctggaca |
| | | agcggagaggacgggacccagaaatgggcgggaagc |
| | | cgcgcagaaagaatccccaagagggcctgtacaacga |
| | | gctccaaaaggataagatggcagaagcctatagcgaga |
| | | ttggtatgaaaggggaacgcagaagaggcaaaggcca |
| | | cgacggactgtaccagggactcagcaccgccaccaagg |
| | | acacctatgacgctcttcacatgcaggccctgccgcctcg |
| | | g (SEQ ID NO: 1096) |
| SP-Linker 5- | MALPVTALLLPLALLLHAARPE | atggccctccctgtcaccgccctgctgcttccgctggctcttc |
| ERmut2-Furin | SLALSLTADQMVSALLDAEPPI | tgctccacgccgctcggcccgagTcgttggcactttccctg |
| cleavage site 3- | LYSEYDPTRPFSEASMMGLLT | actgccgaccagatggtgtccgcccttctggacgccgagc |
| BCMA CAR | NLADRELVHMINWAKRVPGF | ctccaattctgtactcggagtacgatccgactcgcccgttct |
| | VDLTLHDQVHLLECAWMEILM | ccgaagccagcatgatgggcctgttgactaacctggcgg |
| | IGLVWRSMEHPGKLLFAPNLL | accgcgagttggtgcacatgattaactgggctaagcgggt |
| | LDRNQGKCVEGGVEIFDMLLA | gccgggcttcgtggacctgaccctgcacgaccaagtgca |
| | TSSRFRMMNLQGEEFVCLKSI | cctcctggaatgcgcctggatggaaatcctcatgatcggcc |
| | ILLNSGVYTFLSSTLKSLEEKD | tcgtgtggagatccatggagcatcccggaaagctcctgttt |
| | HIHRVLDKITDTLIHLMAKAGLT | gcacccaacctcctgcttgatcgcaaccagggaaaatgc |
| | LQQQHQRLAQLLLILSHIRHM | gtggaagggggtgtcgagattttcgacatgctgctcgccac |
| | SNKRMEHLYSMKCKNVVPLS | ctcttcccggttccggatgatgaatctgcagggagaagagt |
| | DLLLEMLDAHRLGTGAEDPRP | tcgtgtgtctgaagtcaatcatcctgctgaactccggggtct |
| | SRKRREVQLVESGGGLVQPG | ataccttcctgagctcgaccctcaagtcactggaggaaaa |
| | GSLRLSCAVSGFALSNHGMS | agaccacatccatcgcgtgctcgataagatcaccgacac |
| | WVRRAPGKGLEWVSGIVYSG | ccttatccatctcatggcgaaggctggactgaccctgcaac |
| | STYYAASVKGRFTISRDNSRN | agcagcaccagaggctggcccagttgctgctgattctgag |
| | TLYLQMNSLRPEDTAIYYCSA | ccacatccggcacatgtcgaacaagaggatggaacacc |
| | HGGESDVWGQGTTVTVSSAS | tgtacagcatgaagtgcaagaacgtcgtgcctctgtccgat |
| | GGGGSGGRASGGGGSDIQLT | ctgctcctggaaatgctggacgcgcacagactcgggacg |
| | QSPSSLSASVGDRVTITCRAS | ggagctgaagatccacgacccagcagaaagcgacggg |
| | QSISSYLNWYQQKPGKAPKLL | aagtgcaattggtggaatcagggggaggacttgtgcagc |
| | IYAASSLQSGVPSRFSGSGSG | ctggaggatcgctgagactgtcatgtgccgtgtccggctttg |
| | TDFTLTISSLQPEDFATYYCQ | ccctgtccaaccacgggatgtcctgggtccgccgcgcgcc |
| | QSYSTPYTFGQGTKVEIKTTT | tggaaagggcctcgaatgggtgtcgggtattgtgtacagc |
| | PAPRPPTPAPTIASQPLSLRPE | ggtagcacctactatgccgcatccgtgaaggggagattca |
| | ACRPAAGGAVHTRGLDFACDI | ccatcagccgggacaactccaggaacactctgtacctcc |
| | YIWAPLAGTCGVLLLSLVITLY | aaatgaattcgctgaggccagaggacactgccatctacta |
| | CKRGRKKLLYIFKQPFMRPVQ | ctgctccgcgcatggcggagagtccgacgtctggggaca |
| | TTQEEDGCSCRFPEEEEGGC | ggggaccaccgtgaccgtgtctagcgcgtccggcggag |
| | ELRVKFSRSADAPAYQQGQN | gcggcagcgggggtcgggcatcagggggcggcggatc |
| | QLYNELNLGRREEYDVLDKR | ggacatccagctcacccagtccccgagctcgctgtccgcc |
| | RGRDPEMGGKPRRKNPQEG | tccgtgggagatcgggtcaccatcacgtgccgcgccagc |
| | LYNELQKDKMAEAYSEIGMKG | cagtcgatttcctcctacctgaactggtaccaacagaagcc |
| | ERRRGKGHDGLYQGLSTATK | cggaaaagccccgaagcttctcatctacgccgcctcgag |
| | DTYDALHMQALPPR | cctgcagtcaggagtgccctcacggttctccggctccggtt |
| | (SEQ ID NO: 1037) | ccggtactgatttcaccctgaccatttcctccctgcaaccgg |
| | | aggacttcgctacttactactgccagcagtcgtactccacc |
| | | ccctacactttcggacaaggcaccaaggtcgaaatcaag |
| | | accactaccccagcaccgaggccacccaccccggctcct |
| | | accatcgcctcccagcctctgtccctgcgtccggaggcatg |
| | | tagacccgcagctggtggggccgtgcatacccggggtctt |
| | | gacttcgcctgcgatatctacatttgggcccctctggctggta |
| | | cttgcggggtcctgctgctttcactcgtgatcactctttactgta |
| | | agcgcggtcggaagaagctgctgtacatctttaagcaacc |
| | | cttcatgaggcctgtgcagactactcaagaggaggacgg |
| | | ctgttcatgccggttcccagaggaggaggaaggcggctg |
| | | cgaactgcgcgtgaaattcagccgcagcgcagatgctcc |
| | | agcctaccagcaggggcagaaccagctctacaacgaac |
| | | tcaatcttggtcggagagaggagtacgacgtgctggaca |
| | | agcggagaggacgggacccagaaatgggcgggaagc |
| | | cgcgcagaaagaatccccaagagggcctgtacaacga |
| | | gctccaaaaggataagatggcagaagcctatagcgaga |
| | | ttggtatgaaaggggaacgcagaagaggcaaaggcca |
| | | cgacggactgtaccagggactcagcaccgccaccaagg |
| | | acacctatgacgctcttcacatgcaggccctgccgcctcg |
| | | g (SEQ ID NO: 1097) |
| SP-Linker 6- | MALPVTALLLPLALLLHAARPQ | atggccctccctgtcaccgccctgctgcttccgctggctcttc |
| ERmut1-Furin | SLALSLTADQMVSALLDAEPPI | tgctccacgccgctcggccccagtcgttggcactttccctga |
| cleavage site 2- | LYSEYDPTRPFSEASMMGLLT | ctgccgaccagatggtgtccgcccttctggacgccgagcc |
| CD19 CAR2 | NLADRELVHMINWAKRVPGF | tccaattctgtactcggagtacgatccgactcgcccgttctc |
| | VDLALHDQVHLLECAWMEILM | cgaagccagcatgatgggcctgttgactaacctggcgga |
| | IGLVWRSMEHPGKLLFAPNLL | ccgcgagttggtgcacatgattaactgggctaagcgggtg |
| | LDRNQGKCVEGGVEIFDMLLA | ccgggcttcgtggacctggccctgcacgaccaagtgcac |
| | TSSRFRMMNLQGEEFVCLKSI | ctcctggaatgcgcctggatggaaatcctcatgatcggcct |
| | ILLNSGVYTFLSSTLKSLEEKD | cgtgtggagatccatggagcatcccggaaagctcctgtttg |
| | HIHRVLDKITDTLIHLMAKAGLT | cacccaacctcctgcttgatcgcaaccagggaaaatgcgt |
| | LQQQHQRLAQLLLILSHIRHM | ggaagggggtgtcgagattttcgacatgctgctcgccacct |
| | SSKRMEHLYSMKCKNVVPLS | cttcccggttccggatgatgaatctgcagggagaagagttc |
| | DLLLEMLDAHRLGTGAEDPRP | gtgtgtctgaagtcaatcatcctgctgaactccggggtctat |
| | SRKRRSLGDVGEIVMTQSPAT | accttcctgagctcgaccctcaagtcactggaggaaaaa |
| | LSLSPGERATLSCRASQDISK | gaccacatccatcgcgtgctcgataagatcaccgacacc |
| | YLNWYQQKPGQAPRLLIYHTS | cttatccatctcatggcgaaggctggactgaccctgcaaca |
| | RLHSGIPARFSGSGSGTDYTL | gcagcaccagaggctggcccagttgctgctgattctgagc |
| | TISSLQPEDFAVYFCQQGNTL | cacatccggcacatgtcgtccaagaggatggaacacctg |
| | PYTFGQGTKLEIKGGGGSGG | tacagcatgaagtgcaagaacgtcgtgcctctgtccgatct |
| | GGSGGGGSQVQLQESGPGL | gctcctggaaatgctggacgcgcacagactcggaaccg |
| | VKPSETLSLTCTVSGVSLPDY | gcgcggaagacccccggccctccaggaagcgaaggtc |
| | GVSWIRQPPGKGLEWIGVIW | cctcggagacgtgggtgaaattgtgatgacccagtcaccc |
| | GSETTYYSSSLKSRVTISKDN | gccactcttagcctttcacccggtgagcgcgcaaccctgtc |
| | SKNQVSLKLSSVTAADTAVYY | ttgcagagcctcccaagacatctcaaaataccttaattggt |
| | CAKHYYYGGSYAMDYWGQG | atcaacagaagcccggacaggctcctcgccttctgatcta |
| | TLVTVSSTTTPAPRPPTPAPTI | ccacaccagccggctccattctggaatccctgccaggttc |
| | ASQPLSLRPEACRPAAGGAV | agcggtagcggatctgggaccgactacaccctcactatca |
| | HTRGLDFACDIYIWAPLAGTC | gctcactgcagccagaggacttcgctgtctatttctgtcagc |
| | GVLLLSLVITLYCKRGRKKLLYI | aagggaacaccctgccctacacctttggacagggcacca |
| | FKQPFMRPVQTTQEEDGCSC | agctcgagattaaaggtggaggtggcagcggaggaggt |
| | RFPEEEEGGCELRVKFSRSA | gggtccggcggtggaggaagccaggtccaactccaaga |
| | DAPAYQQGQNQLYNELNLGR | aagcggaccgggtcttgtgaagccatcagaaactctttca |
| | REEYDVLDKRRGRDPEMGGK | ctgacttgtactgtgagcggagtgtctctccccgattacggg |
| | PRRKNPQEGLYNELQKDKMA | gtgtcttggatcagacagccaccggggaagggtctggaat |
| | EAYSEIGMKGERRRGKGHDG | ggattggagtgatttggggctctgagactacttactactcttc |
| | LYQGLSTATKDTYDALHMQAL | atccctcaagtcacgcgtcaccatctcaaaggacaactct |
| | PPR (SEQ ID NO: 1038) | aagaatcaggtgtcactgaaactgtcatctgtgaccgcag |
| | | ccgacaccgccgtgtactattgcgctaagcattactattatg |
| | | gcgggagctacgcaatggattactggggacagggtactct |
| | | ggtcaccgtgtccagcaccactaccccagcaccgaggcc |
| | | acccaccccggctcctaccatcgcctcccagcctctgtccc |
| | | tgcgtccggaggcatgtagacccgcagctggtggggccg |
| | | tgcatacccggggtcttgacttcgcctgcgatatctacatttg |
| | | ggcccctctggctggtacttgcggggtcctgctgctttcactc |
| | | gtgatcactctttactgtaagcgcggtcggaagaagctgct |
| | | gtacatctttaagcaacccttcatgaggcctgtgcagacta |
| | | ctcaagaggaggacggctgttcatgccggttcccagagg |
| | | aggaggaaggcggctgcgaactgcgcgtgaaattcagc |
| | | cgcagcgcagatgctccagcctaccagcaggggcagaa |
| | | ccagctctacaacgaactcaatcttggtcggagagagga |
| | | gtacgacgtgctggacaagcggagaggacgggaccca |
| | | gaaatgggcgggaagccgcgcagaaagaatccccaag |
| | | agggcctgtacaacgagctccaaaaggataagatggca |
| | | gaagcctatagcgagattggtatgaaaggggaacgcag |
| | | aagaggcaaaggccacgacggactgtaccagggactc |
| | | agcaccgccaccaaggacacctatgacgctcttcacatg |
| | | caggccctgccgcctcgg (SEQ ID NO: 1098) |
| SP-Linker 6- | MALPVTALLLPLALLLHAARPQ | atggccctccctgtcaccgccctgctgcttccgctggctcttc |
| ERmut2-Furin | SLALSLTADQMVSALLDAEPPI | tgctccacgccgctcggccccagtcgttggcactttccctga |
| cleavage site 2- | LYSEYDPTRPFSEASMMGLLT | ctgccgaccagatggtgtccgcccttctggacgccgagcc |
| CD19 CAR2 | NLADRELVHMINWAKRVPGF | tccaattctgtactcggagtacgatccgactcgcccgttctc |
| | VDLTLHDQVHLLECAWMEILM | cgaagccagcatgatgggcctgttgactaacctggcgga |
| | IGLVWRSMEHPGKLLFAPNLL | ccgcgagttggtgcacatgattaactgggctaagcgggtg |
| | LDRNQGKCVEGGVEIFDMLLA | ccgggcttcgtggacctgaccctgcacgaccaagtgcac |
| | TSSRFRMMNLQGEEFVCLKSI | ctcctggaatgcgcctggatggaaatcctcatgatcggcct |
| | ILLNSGVYTFLSSTLKSLEEKD | cgtgtggagatccatggagcatcccggaaagctcctgtttg |
| | HIHRVLDKITDTLIHLMAKAGLT | cacccaacctcctgcttgatcgcaaccagggaaaatgcgt |
| | LQQQHQRLAQLLLILSHIRHM | ggaagggggtgtcgagattttcgacatgctgctcgccacct |
| | SNKRMEHLYSMKCKNVVPLS | cttcccggttccggatgatgaatctgcagggagaagagttc |
| | DLLLEMLDAHRLGTGAEDPRP | gtgtgtctgaagtcaatcatcctgctgaactccggggtctat |
| | SRKRRSLGDVGEIVMTQSPAT | accttcctgagctcgaccctcaagtcactggaggaaaaa |
| | LSLSPGERATLSCRASQDISK | gaccacatccatcgcgtgctcgataagatcaccgacacc |
| | YLNWYQQKPGQAPRLLIYHTS | cttatccatctcatggcgaaggctggactgaccctgcaaca |
| | RLHSGIPARFSGSGSGTDYTL | gcagcaccagaggctggcccagttgctgctgattctgagc |
| | TISSLQPEDFAVYFCQQGNTL | cacatccggcacatgtcgaacaagaggatggaacacct |
| | PYTFGQGTKLEIKGGGGSGG | gtacagcatgaagtgcaagaacgtcgtgcctctgtccgat |
| | GGSGGGGSQVQLQESGPGL | ctgctcctggaaatgctggacgcgcacagactcggaacc |
| | VKPSETLSLTCTVSGVSLPDY | ggcgcggaagacccccggccctccaggaagcgaaggt |
| | GVSWIRQPPGKGLEWIGVIW | ccctcggagacgtgggtgaaattgtgatgacccagtcacc |
| | GSETTYYSSSLKSRVTISKDN | cgccactcttagcctttcacccggtgagcgcgcaaccctgt |
| | SKNQVSLKLSSVTAADTAVYY | cttgcagagcctcccaagacatctcaaaataccttaattgg |
| | CAKHYYYGGSYAMDYWGQG | tatcaacagaagcccggacaggctcctcgccttctgatcta |
| | TLVTVSSTTTPAPRPPTPAPTI | ccacaccagccggctccattctggaatccctgccaggttc |
| | ASQPLSLRPEACRPAAGGAV | agcggtagcggatctgggaccgactacaccctcactatca |
| | HTRGLDFACDIYIWAPLAGTC | gctcactgcagccagaggacttcgctgtctatttctgtcagc |
| | GVLLLSLVITLYCKRGRKKLLYI | aagggaacaccctgccctacacctttggacagggcacca |
| | FKQPFMRPVQTTQEEDGCSC | agctcgagattaaaggtggaggtggcagcggaggaggt |
| | RFPEEEEGGCELRVKFSRSA | gggtccggcggtggaggaagccaggtccaactccaaga |
| | DAPAYQQGQNQLYNELNLGR | aagcggaccgggtcttgtgaagccatcagaaactctttca |
| | REEYDVLDKRRGRDPEMGGK | ctgacttgtactgtgagcggagtgtctctccccgattacggg |
| | PRRKNPQEGLYNELQKDKMA | gtgtcttggatcagacagccaccggggaagggtctggaat |
| | EAYSEIGMKGERRRGKGHDG | ggattggagtgatttggggctctgagactacttactactcttc |
| | LYQGLSTATKDTYDALHMQAL | atccctcaagtcacgcgtcaccatctcaaaggacaactct |
| | PPR (SEQ ID NO: 1039) | aagaatcaggtgtcactgaaactgtcatctgtgaccgcag |
| | | ccgacaccgccgtgtactattgcgctaagcattactattatg |
| | | gcgggagctacgcaatggattactggggacagggtactct |
| | | ggtcaccgtgtccagcaccactaccccagcaccgaggcc |
| | | acccaccccggctcctaccatcgcctcccagcctctgtccc |
| | | tgcgtccggaggcatgtagacccgcagctggtggggccg |
| | | tgcatacccggggtcttgacttcgcctgcgatatctacatttg |
| | | ggcccctctggctggtacttgcggggtcctgctgctttcactc |
| | | gtgatcactctttactgtaagcgcggtcggaagaagctgct |
| | | gtacatctttaagcaacccttcatgaggcctgtgcagacta |
| | | ctcaagaggaggacggctgttcatgccggttcccagagg |
| | | aggaggaaggcggctgcgaactgcgcgtgaaattcagc |
| | | cgcagcgcagatgctccagcctaccagcaggggcagaa |
| | | ccagctctacaacgaactcaatcttggtcggagagagga |
| | | gtacgacgtgctggacaagcggagaggacgggaccca |
| | | gaaatgggcgggaagccgcgcagaaagaatccccaag |
| | | agggcctgtacaacgagctccaaaaggataagatggca |
| | | gaagcctatagcgagattggtatgaaaggggaacgcag |
| | | aagaggcaaaggccacgacggactgtaccagggactc |
| | | agcaccgccaccaaggacacctatgacgctcttcacatg |
| | | caggccctgccgcctcgg (SEQ ID NO: 1099) |
| SP-Linker 6- | MALPVTALLLPLALLLHAARPQ | atggccctccctgtcaccgccctgctgcttccgctggctcttc |
| ERmut1-Furin | SLALSLTADQMVSALLDAEPPI | tgctccacgccgctcggccccagtcgttggcactttccctga |
| cleavage site 3- | LYSEYDPTRPFSEASMMGLLT | ctgccgaccagatggtgtccgcccttctggacgccgagcc |
| CD19 CAR2 | NLADRELVHMINWAKRVPGF | tccaattctgtactcggagtacgatccgactcgcccgttctc |
| | VDLALHDQVHLLECAWMEILM | cgaagccagcatgatgggcctgttgactaacctggcgga |
| | IGLVWRSMEHPGKLLFAPNLL | ccgcgagttggtgcacatgattaactgggctaagcgggtg |
| | LDRNQGKCVEGGVEIFDMLLA | ccgggcttcgtggacctggccctgcacgaccaagtgcac |
| | TSSRFRMMNLQGEEFVCLKSI | ctcctggaatgcgcctggatggaaatcctcatgatcggcct |
| | ILLNSGVYTFLSSTLKSLEEKD | cgtgtggagatccatggagcatcccggaaagctcctgtttg |
| | HIHRVLDKITDTLIHLMAKAGLT | cacccaacctcctgcttgatcgcaaccagggaaaatgcgt |
| | LQQQHQRLAQLLLILSHIRHM | ggaagggggtgtcgagattttcgacatgctgctcgccacct |
| | SSKRMEHLYSMKCKNVVPLS | cttcccggttccggatgatgaatctgcagggagaagagttc |
| | DLLLEMLDAHRLGTGAEDPRP | gtgtgtctgaagtcaatcatcctgctgaactccggggtctat |
| | SRKRREIVMTQSPATLSLSPG | accttcctgagctcgaccctcaagtcactggaggaaaaa |
| | ERATLSCRASQDISKYLNWYQ | gaccacatccatcgcgtgctcgataagatcaccgacacc |
| | QKPGQAPRLLIYHTSRLHSGIP | cttatccatctcatggcgaaggctggactgaccctgcaaca |
| | ARFSGSGSGTDYTLTISSLQP | gcagcaccagaggctggcccagttgctgctgattctgagc |
| | EDFAVYFCQQGNTLPYTFGQ | cacatccggcacatgtcgtccaagaggatggaacacctg |
| | GTKLEIKGGGGSGGGGSGGG | tacagcatgaagtgcaagaacgtcgtgcctctgtccgatct |
| | GSQVQLQESGPGLVKPSETL | gctcctggaaatgctggacgcgcacagactcgggacgg |
| | SLTCTVSGVSLPDYGVSWIRQ | gagctgaagatccacgacccagcagaaagcgacggga |
| | PPGKGLEWIGVIWGSETTYYS | aattgtgatgacccagtcacccgccactcttagcctttcacc |
| | SSLKSRVTISKDNSKNQVSLK | cggtgagcgcgcaaccctgtcttgcagagcctcccaaga |
| | LSSVTAADTAVYYCAKHYYYG | catctcaaaataccttaattggtatcaacagaagcccgga |
| | GSYAMDYWGQGTLVTVSSTT | caggctcctcgccttctgatctaccacaccagccggctcca |
| | TPAPRPPTPAPTIASQPLSLRP | ttctggaatccctgccaggttcagcggtagcggatctggga |
| | EACRPAAGGAVHTRGLDFAC | ccgactacaccctcactatcagctcactgcagccagagg |
| | DIYIWAPLAGTCGVLLLSLVITL | acttcgctgtctatttctgtcagcaagggaacaccctgccct |
| | YCKRGRKKLLYIFKQPFMRPV | acacctttggacagggcaccaagctcgagattaaaggtg |
| | QTTQEEDGCSCRFPEEEEGG | gaggtggcagcggaggaggtgggtccggcggtggagg |
| | CELRVKFSRSADAPAYQQGQ | aagccaggtccaactccaagaaagcggaccgggtcttgt |
| | NQLYNELNLGRREEYDVLDK | gaagccatcagaaactctttcactgacttgtactgtgagcg |
| | RRGRDPEMGGKPRRKNPQE | gagtgtctctccccgattacggggtgtcttggatcagacag |
| | GLYNELQKDKMAEAYSEIGMK | ccaccggggaagggtctggaatggattggagtgatttggg |
| | GERRRGKGHDGLYQGLSTAT | gctctgagactacttactactcttcatccctcaagtcacgcgt |
| | KDTYDALHMQALPPR | caccatctcaaaggacaactctaagaatcaggtgtcactg |
| | (SEQ ID NO: 1040) | aaactgtcatctgtgaccgcagccgacaccgccgtgtact |
| | | attgcgctaagcattactattatggcgggagctacgcaatg |
| | | gattactggggacagggtactctggtcaccgtgtccagca |
| | | ccactaccccagcaccgaggccacccaccccggctccta |
| | | ccatcgcctcccagcctctgtccctgcgtccggaggcatgt |
| | | agacccgcagctggtggggccgtgcatacccggggtctt |
| | | gacttcgcctgcgatatctacatttgggcccctctggctggta |
| | | cttgcggggtcctgctgctttcactcgtgatcactctttactgta |
| | | agcgcggtcggaagaagctgctgtacatctttaagcaacc |
| | | cttcatgaggcctgtgcagactactcaagaggaggacgg |
| | | ctgttcatgccggttcccagaggaggaggaaggcggctg |
| | | cgaactgcgcgtgaaattcagccgcagcgcagatgctcc |
| | | agcctaccagcaggggcagaaccagctctacaacgaac |
| | | tcaatcttggtcggagagaggagtacgacgtgctggaca |
| | | agcggagaggacgggacccagaaatgggcgggaagc |
| | | cgcgcagaaagaatccccaagagggcctgtacaacga |
| | | gctccaaaaggataagatggcagaagcctatagcgaga |
| | | ttggtatgaaaggggaacgcagaagaggcaaaggcca |
| | | cgacggactgtaccagggactcagcaccgccaccaagg |
| | | acacctatgacgctcttcacatgcaggccctgccgcctcg |
| | | g (SEQ ID NO: 1100) |
| SP-Linker 6- | MALPVTALLLPLALLLHAARPQ | atggccctccctgtcaccgccctgctgcttccgctggctcttc |
| ERmut2-Furin | SLALSLTADQMVSALLDAEPPI | tgctccacgccgctcggccccagTcgttggcactttccctg |
| cleavage site 3- | LYSEYDPTRPFSEASMMGLLT | actgccgaccagatggtgtccgcccttctggacgccgagc |
| CD19 CAR2 | NLADRELVHMINWAKRVPGF | ctccaattctgtactcggagtacgatccgactcgcccgttct |
| | VDLTLHDQVHLLECAWMEILM | ccgaagccagcatgatgggcctgttgactaacctggcgg |
| | IGLVWRSMEHPGKLLFAPNLL | accgcgagttggtgcacatgattaactgggctaagcgggt |
| | LDRNQGKCVEGGVEIFDMLLA | gccgggcttcgtggacctgaccctgcacgaccaagtgca |
| | TSSRFRMMNLQGEEFVCLKSI | cctcctggaatgcgcctggatggaaatcctcatgatcggcc |
| | ILLNSGVYTFLSSTLKSLEEKD | tcgtgtggagatccatggagcatcccggaaagctcctgttt |
| | HIHRVLDKITDTLIHLMAKAGLT | gcacccaacctcctgcttgatcgcaaccagggaaaatgc |
| | LQQQHQRLAQLLLILSHIRHM | gtggaagggggtgtcgagattttcgacatgctgctcgccac |
| | SNKRMEHLYSMKCKNVVPLS | ctcttcccggttccggatgatgaatctgcagggagaagagt |
| | DLLLEMLDAHRLGTGAEDPRP | tcgtgtgtctgaagtcaatcatcctgctgaactccggggtct |
| | SRKRREIVMTQSPATLSLSPG | ataccttcctgagctcgaccctcaagtcactggaggaaaa |
| | ERATLSCRASQDISKYLNWYQ | agaccacatccatcgcgtgctcgataagatcaccgacac |
| | QKPGQAPRLLIYHTSRLHSGIP | ccttatccatctcatggcgaaggctggactgaccctgcaac |
| | ARFSGSGSGTDYTLTISSLQP | agcagcaccagaggctggcccagttgctgctgattctgag |
| | EDFAVYFCQQGNTLPYTFGQ | ccacatccggcacatgtcgaacaagaggatggaacacc |
| | GTKLEIKGGGGSGGGGSGGG | tgtacagcatgaagtgcaagaacgtcgtgcctctgtccgat |
| | GSQVQLQESGPGLVKPSETL | ctgctcctggaaatgctggacgcgcacagactcGggacg |
| | SLTCTVSGVSLPDYGVSWIRQ | ggagctgaagatccacgacccagcagaaagcgacggg |
| | PPGKGLEWIGVIWGSETTYYS | aaattgtgatgacccagtcacccgccactcttagcctttcac |
| | SSLKSRVTISKDNSKNQVSLK | ccggtgagcgcgcaaccctgtcttgcagagcctcccaag |
| | LSSVTAADTAVYYCAKHYYYG | acatctcaaaataccttaattggtatcaacagaagcccgg |
| | GSYAMDYWGQGTLVTVSSTT | acaggctcctcgccttctgatctaccacaccagccggctcc |
| | TPAPRPPTPAPTIASQPLSLRP | attctggaatccctgccaggttcagcggtagcggatctggg |
| | EACRPAAGGAVHTRGLDFAC | accgactacaccctcactatcagctcactgcagccagag |
| | DIYIWAPLAGTCGVLLLSLVITL | gacttcgctgtctatttctgtcagcaagggaacaccctgccc |
| | YCKRGRKKLLYIFKQPFMRPV | tacacctttggacagggcaccaagctcgagattaaaggtg |
| | QTTQEEDGCSCRFPEEEEGG | gaggtggcagcggaggaggtgggtccggcggtggagg |
| | CELRVKFSRSADAPAYQQGQ | aagccaggtccaactccaagaaagcggaccgggtcttgt |
| | NQLYNELNLGRREEYDVLDK | gaagccatcagaaactctttcactgacttgtactgtgagcg |
| | RRGRDPEMGGKPRRKNPQE | gagtgtctctccccgattacggggtgtcttggatcagacag |
| | GLYNELQKDKMAEAYSEIGMK | ccaccggggaagggtctggaatggattggagtgatttggg |
| | GERRRGKGHDGLYQGLSTAT | gctctgagactacttactactcttcatccctcaagtcacgcgt |
| | KDTYDALHMQALPPR | caccatctcaaaggacaactctaagaatcaggtgtcactg |
| | (SEQ ID NO: 1041) | aaactgtcatctgtgaccgcagccgacaccgccgtgtact |
| | | attgcgctaagcattactattatggcgggagctacgcaatg |
| | | gattactggggacagggtactctggtcaccgtgtccagca |
| | | ccactaccccagcaccgaggccacccaccccggctccta |
| | | ccatcgcctcccagcctctgtccctgcgtccggaggcatgt |
| | | agacccgcagctggtggggccgtgcatacccggggtctt |
| | | gacttcgcctgcgatatctacatttgggcccctctggctggta |
| | | cttgcggggtcctgctgctttcactcgtgatcactctttactgta |
| | | agcgcggtcggaagaagctgctgtacatctttaagcaacc |
| | | cttcatgaggcctgtgcagactactcaagaggaggacgg |
| | | ctgttcatgccggttcccagaggaggaggaaggcggctg |
| | | cgaactgcgcgtgaaattcagccgcagcgcagatgctcc |
| | | agcctaccagcaggggcagaaccagctctacaacgaac |
| | | tcaatcttggtcggagagaggagtacgacgtgctggaca |
| | | agcggagaggacgggacccagaaatgggcgggaagc |
| | | cgcgcagaaagaatccccaagagggcctgtacaacga |
| | | gctccaaaaggataagatggcagaagcctatagcgaga |
| | | ttggtatgaaaggggaacgcagaagaggcaaaggcca |
| | | cgacggactgtaccagggactcagcaccgccaccaagg |
| | | acacctatgacgctcttcacatgcaggccctgccgcctcg |
| | | g (SEQ ID NO: 1101) |
| SP-Linker 6- | MALPVTALLLPLALLLHAARPQ | atggccctccctgtcaccgccctgctgcttccgctggctcttc |
| ERmut1-Furin | SLALSLTADQMVSALLDAEPPI | tgctccacgccgctcggccccagtcgttggcactttccctga |
| cleavage site 2- | LYSEYDPTRPFSEASMMGLLT | ctgccgaccagatggtgtccgcccttctggacgccgagcc |
| CD123 CAR | NLADRELVHMINWAKRVPGF | tccaattctgtactcggagtacgatccgactcgcccgttctc |
| | VDLALHDQVHLLECAWMEILM | cgaagccagcatgatgggcctgttgactaacctggcgga |
| | IGLVWRSMEHPGKLLFAPNLL | ccgcgagttggtgcacatgattaactgggctaagcgggtg |
| | LDRNQGKCVEGGVEIFDMLLA | ccgggcttcgtggacctggccctgcacgaccaagtgcac |
| | TSSRFRMMNLQGEEFVCLKSI | ctcctggaatgcgcctggatggaaatcctcatgatcggcct |
| | ILLNSGVYTFLSSTLKSLEEKD | cgtgtggagatccatggagcatcccggaaagctcctgtttg |
| | HIHRVLDKITDTLIHLMAKAGLT | cacccaacctcctgcttgatcgcaaccagggaaaatgcgt |
| | LQQQHQRLAQLLLILSHIRHM | ggaagggggtgtcgagattttcgacatgctgctcgccacct |
| | SSKRMEHLYSMKCKNVVPLS | cttcccggttccggatgatgaatctgcagggagaagagttc |
| | DLLLEMLDAHRLGTGAEDPRP | gtgtgtctgaagtcaatcatcctgctgaactccggggtctat |
| | SRKRRSLGDVGQVQLVQSGA | accttcctgagctcgaccctcaagtcactggaggaaaaa |
| | EVKKPGASVKVSCKASGYTFT | gaccacatccatcgcgtgctcgataagatcaccgacacc |
| | GYYMHWVRQAPGQGLEWM | cttatccatctcatggcgaaggctggactgaccctgcaaca |
| | GWINPNSGGTNYAQKFQGRV | gcagcaccagaggctggcccagttgctgctgattctgagc |
| | TLTRDTSISTVYMELSRLRSD | cacatccggcacatgtcgtccaagaggatggaacacctg |
| | DTAVYYCARDMNILATVPFDI | tacagcatgaagtgcaagaacgtcgtgcctctgtccgatct |
| | WGQGTMVTVSSGGGGSGGG | gctcctggaaatgctggacgcgcacagactcggaaccg |
| | GSGGGGSDIQMTQSPSSLSA | gcgcggaagacccccggccctccaggaagcgaaggtc |
| | SVGDRVTITCRASQSISSYLN | cctcggagacgtgggtcaagtgcaactcgtccaaagcgg |
| | WYQQKPGKAPKLLIYAASSLQ | agcggaagtcaagaaacccggagcgagcgtgaaagtg |
| | SGVPSRFSGSGSGTDFTLTV | tcctgcaaagcctccggctacacctttacgggctactacat |
| | NSLQPEDFATYYCQQGDSVP | gcactgggtgcgccaggcaccaggacagggtcttgaatg |
| | LTFGGGTRLEIKTTTPAPRPPT | gatgggatggatcaaccctaattcgggcggaactaactac |
| | PAPTIASQPLSLRPEACRPAA | gcacagaagttccaggggagagtgactctgactcgggat |
| | GGAVHTRGLDFACDIYIWAPL | acctccatctcaactgtctacatggaactctcccgcttgcgg |
| | AGTCGVLLLSLVITLYCKRGRK | tcagatgatacggcagtgtactactgcgcccgcgacatga |
| | KLLYIFKQPFMRPVQTTQEED | atatcctggctaccgtgccgttcgacatctggggacaggg |
| | GCSCRFPEEEEGGCELRVKF | gactatggttactgtctcatcgggcggtggaggttcaggag |
| | SRSADAPAYQQGQNQLYNEL | gaggcggctcgggaggcggaggttcggacattcagatg |
| | NLGRREEYDVLDKRRGRDPE | acccagtccccatcctctctgtcggccagcgtcggagata |
| | MGGKPRRKNPQEGLYNELQK | gggtgaccattacctgtcgggcctcgcaaagcatctcctcg |
| | DKMAEAYSEIGMKGERRRGK | tacctcaactggtatcagcaaaagccgggaaaggcgcct |
| | GHDGLYQGLSTATKDTYDAL | aagctgctgatctacgccgcttcgagcttgcaaagcgggg |
| | HMQALPPR (SEQ ID NO: | tgccatccagattctcgggatcaggctcaggaaccgacttc |
| | 1042) | accctgaccgtgaacagcctccagccggaggactttgcc |
| | | acttactactgccagcagggagactccgtgccgcttactttc |
| | | ggggggggtacccgcctggagatcaagaccactacccc |
| | | agcaccgaggccacccaccccggctcctaccatcgcctc |
| | | ccagcctctgtccctgcgtccggaggcatgtagacccgca |
| | | gctggtggggccgtgcatacccggggtcttgacttcgcctg |
| | | cgatatctacatttgggcccctctggctggtacttgcggggt |
| | | cctgctgctttcactcgtgatcactctttactgtaagcgcggtc |
| | | ggaagaagctgctgtacatctttaagcaacccttcatgagg |
| | | cctgtgcagactactcaagaggaggacggctgttcatgcc |
| | | ggttcccagaggaggaggaaggcggctgcgaactgcgc |
| | | gtgaaattcagccgcagcgcagatgctccagcctaccag |
| | | caggggcagaaccagctctacaacgaactcaatcttggt |
| | | cggagagaggagtacgacgtgctggacaagcggagag |
| | | gacgggacccagaaatgggcgggaagccgcgcagaa |
| | | agaatccccaagagggcctgtacaacgagctccaaaag |
| | | gataagatggcagaagcctatagcgagattggtatgaaa |
| | | ggggaacgcagaagaggcaaaggccacgacggactgt |
| | | accagggactcagcaccgccaccaaggacacctatgac |
| | | gctcttcacatgcaggccctgccgcctcgg (SEQ ID NO: 1102) |
| SP-Linker 6- | MALPVTALLLPLALLLHAARPQ | atggccctccctgtcaccgccctgctgcttccgctggctcttc |
| ERmut2-Furin | SLALSLTADQMVSALLDAEPPI | tgctccacgccgctcggccccagTcgttggcactttccctg |
| cleavage site 2- | LYSEYDPTRPFSEASMMGLLT | actgccgaccagatggtgtccgcccttctggacgccgagc |
| CD123 CAR | NLADRELVHMINWAKRVPGF | ctccaattctgtactcggagtacgatccgactcgcccgttct |
| | VDLTLHDQVHLLECAWMEILM | ccgaagccagcatgatgggcctgttgactaacctggcgg |
| | IGLVWRSMEHPGKLLFAPNLL | accgcgagttggtgcacatgattaactgggctaagcgggt |
| | LDRNQGKCVEGGVEIFDMLLA | gccgggcttcgtggacctgaccctgcacgaccaagtgca |
| | TSSRFRMMNLQGEEFVCLKSI | cctcctggaatgcgcctggatggaaatcctcatgatcggcc |
| | ILLNSGVYTFLSSTLKSLEEKD | tcgtgtggagatccatggagcatcccggaaagctcctgttt |
| | HIHRVLDKITDTLIHLMAKAGLT | gcacccaacctcctgcttgatcgcaaccagggaaaatgc |
| | LQQQHQRLAQLLLILSHIRHM | gtggaagggggtgtcgagattttcgacatgctgctcgccac |
| | SNKRMEHLYSMKCKNVVPLS | ctcttcccggttccggatgatgaatctgcagggagaagagt |
| | DLLLEMLDAHRLGTGAEDPRP | tcgtgtgtctgaagtcaatcatcctgctgaactccggggtct |
| | SRKRRSLGDVGQVQLVQSGA | ataccttcctgagctcgaccctcaagtcactggaggaaaa |
| | EVKKPGASVKVSCKASGYTFT | agaccacatccatcgcgtgctcgataagatcaccgacac |
| | GYYMHWVRQAPGQGLEWM | ccttatccatctcatggcgaaggctggactgaccctgcaac |
| | GWINPNSGGTNYAQKFQGRV | agcagcaccagaggctggcccagttgctgctgattctgag |
| | TLTRDTSISTVYMELSRLRSD | ccacatccggcacatgtcgaacaagaggatggaacacc |
| | DTAVYYCARDMNILATVPFDI | tgtacagcatgaagtgcaagaacgtcgtgcctctgtccgat |
| | WGQGTMVTVSSGGGGSGGG | ctgctcctggaaatgctggacgcgcacagactcggaacc |
| | GSGGGGSDIQMTQSPSSLSA | ggcgcggaagacccccggccctccaggaagcgaaggt |
| | SVGDRVTITCRASQSISSYLN | ccctcggagacgtgggtcaagtgcaactcgtccaaagcg |
| | WYQQKPGKAPKLLIYAASSLQ | gagcggaagtcaagaaacccggagcgagcgtgaaagt |
| | SGVPSRFSGSGSGTDFTLTV | gtcctgcaaagcctccggctacacctttacgggctactaca |
| | NSLQPEDFATYYCQQGDSVP | tgcactgggtgcgccaggcaccaggacagggtcttgaat |
| | LTFGGGTRLEIKTTTPAPRPPT | ggatgggatggatcaaccctaattcgggcggaactaacta |
| | PAPTIASQPLSLRPEACRPAA | cgcacagaagttccaggggagagtgactctgactcggga |
| | GGAVHTRGLDFACDIYIWAPL | tacctccatctcaactgtctacatggaactctcccgcttgcg |
| | AGTCGVLLLSLVITLYCKRGRK | gtcagatgatacggcagtgtactactgcgcccgcgacatg |
| | KLLYIFKQPFMRPVQTTQEED | aatatcctggctaccgtgccgttcgacatctggggacagg |
| | GCSCRFPEEEEGGCELRVKF | ggactatggttactgtctcatcgggcggtggaggttcagga |
| | SRSADAPAYQQGQNQLYNEL | ggaggcggctcgggaggcggaggttcggacattcagat |
| | NLGRREEYDVLDKRRGRDPE | gacccagtccccatcctctctgtcggccagcgtcggagat |
| | MGGKPRRKNPQEGLYNELQK | agggtgaccattacctgtcgggcctcgcaaagcatctcctc |
| | DKMAEAYSEIGMKGERRRGK | gtacctcaactggtatcagcaaaagccgggaaaggcgc |
| | GHDGLYQGLSTATKDTYDAL | ctaagctgctgatctacgccgcttcgagcttgcaaagcgg |
| | HMQALPPR (SEQ ID NO: | ggtgccatccagattctcgggatcaggctcaggaaccga |
| | 1043) | cttcaccctgaccgtgaacagcctccagccggaggacttt |
| | | gccacttactactgccagcagggagactccgtgccgctta |
| | | ctttcggggggggtacccgcctggagatcaagaccacta |
| | | ccccagcaccgaggccacccaccccggctcctaccatcg |
| | | cctcccagcctctgtccctgcgtccggaggcatgtagaccc |
| | | gcagctggtggggccgtgcatacccggggtcttgacttcg |
| | | cctgcgatatctacatttgggcccctctggctggtacttgcgg |
| | | ggtcctgctgctttcactcgtgatcactctttactgtaagcgcg |
| | | gtcggaagaagctgctgtacatctttaagcaacccttcatg |
| | | aggcctgtgcagactactcaagaggaggacggctgttcat |
| | | gccggttcccagaggaggaggaaggcggctgcgaactg |
| | | cgcgtgaaattcagccgcagcgcagatgctccagcctac |
| | | cagcaggggcagaaccagctctacaacgaactcaatctt |
| | | ggtcggagagaggagtacgacgtgctggacaagcgga |
| | | gaggacgggacccagaaatgggcgggaagccgcgca |
| | | gaaagaatccccaagagggcctgtacaacgagctccaa |
| | | aaggataagatggcagaagcctatagcgagattggtatg |
| | | aaaggggaacgcagaagaggcaaaggccacgacgg |
| | | actgtaccagggactcagcaccgccaccaaggacacct |
| | | atgacgctcttcacatgcaggccctgccgcctcgg (SEQ ID |
| | | NO: 1103) |
| SP-Linker 6- | MALPVTALLLPLALLLHAARPQ | atggccctccctgtcaccgccctgctgcttccgctggctcttc |
| ERmut1-Furin | SLALSLTADQMVSALLDAEPPI | tgctccacgccgctcggccccagtcgttggcactttccctga |
| cleavage site 3- | LYSEYDPTRPFSEASMMGLLT | ctgccgaccagatggtgtccgcccttctggacgccgagcct |
| CD123 CAR | NLADRELVHMINWAKRVPGF | ccaattctgtactcggagtacgatccgactcgcccgttctcc |
| | VDLALHDQVHLLECAWMEILM | gaagccagcatgatgggcctgttgactaacctggcggacc |
| | IGLVWRSMEHPGKLLFAPNLL | gcgagttggtgcacatgattaactgggctaagcgggtgccg |
| | LDRNQGKCVEGGVEIFDMLLA | ggcttcgtggacctggccctgcacgaccaagtgcacctcct |
| | TSSRFRMMNLQGEEFVCLKSI | ggaatgcgcctggatggaaatcctcatgatcggcctcgtgt |
| | ILLNSGVYTFLSSTLKSLEEKD | ggagatccatggagcatcccggaaagctcctgtttgcaccc |
| | HIHRVLDKITDTLIHLMAKAGLT | aacctcctgcttgatcgcaaccagggaaaatgcgtggaag |
| | LQQQHQRLAQLLLILSHIRHM | ggggtgtcgagattttcgacatgctgctcgccacctcttccc |
| | SSKRMEHLYSMKCKNVVPLS | ggttccggatgatgaatctgcagggagaagagttcgtgtgt |
| | DLLLEMLDAHRLGTGAEDPRP | ctgaagtcaatcatcctgctgaactccggggtctataccttc |
| | SRKRRQVQLVQSGAEVKKPG | ctgagctcgaccctcaagtcactggaggaaaaagaccaca |
| | ASVKVSCKASGYTFTGYYMH | tccatcgcgtgctcgataagatcaccgacacccttatccatc |
| | WVRQAPGQGLEWMGWINPN | tcatggcgaaggctggactgaccctgcaacagcagcacca |
| | SGGTNYAQKFQGRVTLTRDT | gaggctggcccagttgctgctgattctgagccacatccggc |
| | SISTVYMELSRLRSDDTAVYY | acatgtcgtccaagaggatggaacacctgtacagcatgaa |
| | CARDMNILATVPFDIWGQGTM | gtgcaagaacgtcgtgcctctgtccgatctgctcctggaaat |
| | VTVSSGGGGSGGGGSGGGG | gctggacgcgcacagactcggaaccggcgcggaagaccc |
| | SDIQMTQSPSSLSASVGDRVT | ccggccctccaggaagcgaaggcaagtgcaactcgtccaa |
| | ITCRASQSISSYLNWYQQKPG | agcggagcggaagtcaagaaacccggagcgagcgtgaaa |
| | KAPKLLIYAASSLQSGVPSRFS | gtgtcctgcaaagcctccggctacacctttacgggctactac |
| | GSGSGTDFTLTVNSLQPEDFA | atgcactgggtgcgccaggcaccaggacagggtcttgaat |
| | TYYCQQGDSVPLTFGGGTRL | ggatgggatggatcaaccctaattcgggcggaactaacta |
| | EIKTTTPAPRPPTPAPTI | cgcacagaagttccaggggagagtgactctgactcgggat |
| | ASQPLSLRPEACRPAAGG | acctccatctcaactgtctacatggaactctcccgcttgcgg |
| | AVHTRGLDFACDIYIWAPLA | tcagatgatacggcagtgtactactgcgcccgcgacatgaa |
| | GTCGVLLLSLVITLYCKRGR | tatcctggctaccgtgccgttcgacatctggggacagggga |
| | KKLLYIFKQPFMRPVQTTQ | ctatggttactgtctcatcgggcggtggaggttcaggagga |
| | EEDGCSCRFPEEEEGGCE | ggcggctcgggaggcggaggttcggacattcagatgaccc |
| | LRVKFSRSADAPAYQQGQ | agtccccatcctctctgtcggccagcgtcggagatagggtg |
| | NQLYNELNLGRREEYDVLD | accattacctgtcgggcctcgcaaagcatctcctcgtacctc |
| | KRRGRDPEMGGKPRRKNP | aactggtatcagcaaaagccgggaaaggcgcctaagctgc |
| | QEGLYNELQKDKMAEAYS | tgatctacgccgcttcgagcttgcaaagcggggtgccatcc |
| | EIGMKGERRRGKGHDGLY | agattctcgggatcaggctcaggaaccgacttcaccctgac |
| | QGLSTATKDTYDALHMQAL | cgtgaacagcctccagccggaggactttgccacttactact |
| | PPR (SEQ ID NO: 1044) | gccagcagggagactccgtgccgcttactttcggggggggt |
| | | acccgcctggagatcaagaccactaccccagcaccgaggc |
| | | cacccaccccggctcctaccatcgcctcccagcctctgtccc |
| | | tgcgtccggaggcatgtagacccgcagctggtggggccgt |
| | | gcatacccggggtcttgacttcgcctgcgatatctacatttg |
| | | ggcccctctggctggtacttgcggggtcctgctgctttcactc |
| | | gtgatcactctttactgtaagcgcggtcggaagaagctgct |
| | | gtacatctttaagcaacccttcatgaggcctgtgcagactac |
| | | tcaagaggaggacggctgttcatgccggttcccagaggag |
| | | gaggaaggcggctgcgaactgcgcgtgaaattcagccgca |
| | | gcgcagatgctccagcctaccagcaggggcagaaccagct |
| | | ctacaacgaactcaatcttggtcggagagaggagtacgac |
| | | gtgctggacaagcggagaggacgggacccagaaatgggc |
| | | gggaagccgcgcagaaagaatccccaagagggcctgtac |
| | | aacgagctccaaaaggataagatggcagaagcctatagc |
| | | gagattggtatgaaaggggaacgcagaagaggcaaaggc |
| | | cacgacggactgtaccagggactcagcaccgccaccaagg |
| | | acacctatgacgctcttcacatgcaggccctgccgcctcgg |
| | | (SEQ ID NO: 1104) |
| SP-Linker 6- | MALPVTALLLPLALLLHAARPQ | atggccctccctgtcaccgccctgctgcttccgctggctcttc |
| ERmut2-Furin | SLALSLTADQMVSALLDAEPPI | tgctccacgccgctcggccccagTcgttggcactttccctg |
| cleavage site 3- | LYSEYDPTRPFSEASMMGLLT | actgccgaccagatggtgtccgcccttctggacgccgagc |
| CD123 CAR | NLADRELVHMINWAKRVPGF | ctccaattctgtactcggagtacgatccgactcgcccgttct |
| | VDLTLHDQVHLLECAWMEILM | ccgaagccagcatgatgggcctgttgactaacctggcgg |
| | IGLVWRSMEHPGKLLFAPNLL | accgcgagttggtgcacatgattaactgggctaagcgggt |
| | LDRNQGKCVEGGVEIFDMLLA | gccgggcttcgtggacctgaccctgcacgaccaagtgca |
| | TSSRFRMMNLQGEEFVCLKSI | cctcctggaatgcgcctggatggaaatcctcatgatcggcc |
| | ILLNSGVYTFLSSTLKSLEEKD | tcgtgtggagatccatggagcatcccggaaagctcctgttt |
| | HIHRVLDKITDTLIHLMAKAGLT | gcacccaacctcctgcttgatcgcaaccagggaaaatgc |
| | LQQQHQRLAQLLLILSHIRHM | gtggaagggggtgtcgagattttcgacatgctgctcgccac |
| | SNKRMEHLYSMKCKNVVPLS | ctcttcccggttccggatgatgaatctgcagggagaagagt |
| | DLLLEMLDAHRLGTGAEDPRP | tcgtgtgtctgaagtcaatcatcctgctgaactccggggtct |
| | SRKRRQVQLVQSGAEVKKPG | ataccttcctgagctcgaccctcaagtcactggaggaaaa |
| | ASVKVSCKASGYTFTGYYMH | agaccacatccatcgcgtgctcgataagatcaccgacac |
| | WVRQAPGQGLEWMGWINPN | ccttatccatctcatggcgaaggctggactgaccctgcaac |
| | SGGTNYAQKFQGRVTLTRDT | agcagcaccagaggctggcccagttgctgctgattctgag |
| | SISTVYMELSRLRSDDTAVYY | ccacatccggcacatgtcgaacaagaggatggaacacc |
| | CARDMNILATVPFDIWGQGTM | tgtacagcatgaagtgcaagaacgtcgtgcctctgtccgat |
| | VTVSSGGGGSGGGGSGGGG | ctgctcctggaaatgctggacgcgcacagactcgggacg |
| | SDIQMTQSPSSLSASVGDRVT | ggagctgaagatccacgacccagcagaaagcgacggc |
| | ITCRASQSISSYLNWYQQKPG | aagtgcaactcgtccaaagcggagcggaagtcaagaaa |
| | KAPKLLIYAASSLQSGVPSRFS | cccggagcgagcgtgaaagtgtcctgcaaagcctccggc |
| | GSGSGTDFTLTVNSLQPEDFA | tacacctttacgggctactacatgcactgggtgcgccaggc |
| | TYYCQQGDSVPLTFGGGTRL | accaggacagggtcttgaatggatgggatggatcaaccct |
| | EIKTTTPAPRPPTPAPTIASQP | aattcgggcggaactaactacgcacagaagttccagggg |
| | LSLRPEACRPAAGGAVHTRG | agagtgactctgactcgggatacctccatctcaactgtctac |
| | LDFACDIYIWAPLAGTCGVLLL | atggaactctcccgcttgcggtcagatgatacggcagtgta |
| | SLVITLYCKRGRKKLLYIFKQP | ctactgcgcccgcgacatgaatatcctggctaccgtgccgt |
| | FMRPVQTTQEEDGCSCRFPE | tcgacatctggggacaggggactatggttactgtctcatcg |
| | EEEGGCELRVKFSRSADAPA | ggcggtggaggttcaggaggaggcggctcgggaggcg |
| | YQQGQNQLYNELNLGRREEY | gaggttcggacattcagatgacccagtccccatcctctctgt |
| | DVLDKRRGRDPEMGGKPRRK | cggccagcgtcggagatagggtgaccattacctgtcggg |
| | NPQEGLYNELQKDKMAEAYS | cctcgcaaagcatctcctcgtacctcaactggtatcagcaa |
| | EIGMKGERRRGKGHDGLYQG | aagccgggaaaggcgcctaagctgctgatctacgccgct |
| | LSTATKDTYDALHMQALPPR | tcgagcttgcaaagcggggtgccatccagattctcgggat |
| | (SEQ ID NO: 1045) | caggctcaggaaccgacttcaccctgaccgtgaacagcc |
| | | tccagccggaggactttgccacttactactgccagcaggg |
| | | agactccgtgccgcttactttcggggggggtacccgcctgg |
| | | agatcaagaccactaccccagcaccgaggccacccacc |
| | | ccggctcctaccatcgcctcccagcctctgtccctgcgtccg |
| | | gaggcatgtagacccgcagctggtggggccgtgcatacc |
| | | cggggtcttgacttcgcctgcgatatctacatttgggcccctc |
| | | tggctggtacttgcggggtcctgctgctttcactcgtgatcac |
| | | tctttactgtaagcgcggtcggaagaagctgctgtacatcttt |
| | | aagcaacccttcatgaggcctgtgcagactactcaagag |
| | | gaggacggctgttcatgccggttcccagaggaggaggaa |
| | | ggcggctgcgaactgcgcgtgaaattcagccgcagcgc |
| | | agatgctccagcctaccagcaggggcagaaccagctcta |
| | | caacgaactcaatcttggtcggagagaggagtacgacgt |
| | | gctggacaagcggagaggacgggacccagaaatgggc |
| | | gggaagccgcgcagaaagaatccccaagagggcctgt |
| | | acaacgagctccaaaaggataagatggcagaagcctat |
| | | agcgagattggtatgaaaggggaacgcagaagaggca |
| | | aaggccacgacggactgtaccagggactcagcaccgcc |
| | | accaaggacacctatgacgctcttcacatgcaggccctgc |
| | | cgcctcgg (SEQ ID NO: 1105) |
| SP-Linker 6- | MALPVTALLLPLALLLHAARPQ | atggccctccctgtcaccgccctgctgcttccgctggctcttc |
| ERmut1-Furin | SLALSLTADQMVSALLDAEPPI | tgctccacgccgctcggccccagTcgttggcactttccctg |
| cleavage site 2- | LYSEYDPTRPFSEASMMGLLT | actgccgaccagatggtgtccgcccttctggacgccgagc |
| BCMA CAR | NLADRELVHMINWAKRVPGF | ctccaattctgtactcggagtacgatccgactcgcccgttct |
| | VDLALHDQVHLLECAWMEILM | ccgaagccagcatgatgggcctgttgactaacctggcgg |
| | IGLVWRSMEHPGKLLFAPNLL | accgcgagttggtgcacatgattaactgggctaagcgggt |
| | LDRNQGKCVEGGVEIFDMLLA | gccgggcttcgtggacctggccctgcacgaccaagtgca |
| | TSSRFRMMNLQGEEFVCLKSI | cctcctggaatgcgcctggatggaaatcctcatgatcggcc |
| | ILLNSGVYTFLSSTLKSLEEKD | tcgtgtggagatccatggagcatcccggaaagctcctgttt |
| | HIHRVLDKITDTLIHLMAKAGLT | gcacccaacctcctgcttgatcgcaaccagggaaaatgc |
| | LQQQHQRLAQLLLILSHIRHM | gtggaagggggtgtcgagattttcgacatgctgctcgccac |
| | SSKRMEHLYSMKCKNVVPLS | ctcttcccggttccggatgatgaatctgcagggagaagagt |
| | DLLLEMLDAHRLGTGAEDPRP | tcgtgtgtctgaagtcaatcatcctgctgaactccggggtct |
| | SRKRRSLGDVGEVQLVESGG | ataccttcctgagctcgaccctcaagtcactggaggaaaa |
| | GLVQPGGSLRLSCAVSGFALS | agaccacatccatcgcgtgctcgataagatcaccgacac |
| | NHGMSWVRRAPGKGLEWVS | ccttatccatctcatggcgaaggctggactgaccctgcaac |
| | GIVYSGSTYYAASVKGRFTISR | agcagcaccagaggctggcccagttgctgctgattctgag |
| | DNSRNTLYLQMNSLRPEDTAI | ccacatccggcacatgtcgtccaagaggatggaacacct |
| | YYCSAHGGESDVWGQGTTVT | gtacagcatgaagtgcaagaacgtcgtgcctctgtccgat |
| | VSSASGGGGSGGRASGGGG | ctgctcctggaaatgctggacgcgcacagactcggaacc |
| | SDIQLTQSPSSLSASVGDRVTI | ggcgcggaagacccccggccctccaggaagcgaaggt |
| | TCRASQSISSYLNWYQQKPG | ccctcggagacgtgggtgaagtgcaattggtggaatcag |
| | KAPKLLIYAASSLQSGVPSRFS | ggggaggacttgtgcagcctggaggatcgctgagactgtc |
| | GSGSGTDFTLTISSLQPEDFA | atgtgccgtgtccggctttgccctgtccaaccacgggatgtc |
| | TYYCQQSYSTPYTFGQGTKV | ctgggtccgccgcgcgcctggaaagggcctcgaatgggt |
| | EIKTTTPAPRPPTPAPTIASQP | gtcgggtattgtgtacagcggtagcacctactatgccgcat |
| | LSLRPEACRPAAGGAVHTRG | ccgtgaaggggagattcaccatcagccgggacaactcc |
| | LDFACDIYIWAPLAGTCGVLLL | aggaacactctgtacctccaaatgaattcgctgaggccag |
| | SLVITLYCKRGRKKLLYIFKQP | aggacactgccatctactactgctccgcgcatggcggaga |
| | FMRPVQTTQEEDGCSCRFPE | gtccgacgtctggggacaggggaccaccgtgaccgtgtc |
| | EEEGGCELRVKFSRSADAPA | tagcgcgtccggcggaggcggcagcgggggtcgggcat |
| | YQQGQNQLYNELNLGRREEY | cagggggcggcggatcggacatccagctcacccagtcc |
| | DVLDKRRGRDPEMGGKPRRK | ccgagctcgctgtccgcctccgtgggagatcgggtcacca |
| | NPQEGLYNELQKDKMAEAYS | tcacgtgccgcgccagccagtcgatttcctcctacctgaac |
| | EIGMKGERRRGKGHDGLYQG | tggtaccaacagaagcccggaaaagccccgaagcttctc |
| | LSTATKDTYDALHMQALPPR | atctacgccgcctcgagcctgcagtcaggagtgccctcac |
| | (SEQ ID NO: 1046) | ggttctccggctccggttccggtactgatttcaccctgaccat |
| | | ttcctccctgcaaccggaggacttcgctacttactactgcca |
| | | gcagtcgtactccaccccctacactttcggacaaggcacc |
| | | aaggtcgaaatcaagaccactaccccagcaccgaggcc |
| | | acccaccccggctcctaccatcgcctcccagcctctgtccc |
| | | tgcgtccggaggcatgtagacccgcagctggtggggccg |
| | | tgcatacccggggtcttgacttcgcctgcgatatctacatttg |
| | | ggcccctctggctggtacttgcggggtcctgctgctttcactc |
| | | gtgatcactctttactgtaagcgcggtcggaagaagctgct |
| | | gtacatctttaagcaacccttcatgaggcctgtgcagacta |
| | | ctcaagaggaggacggctgttcatgccggttcccagagg |
| | | aggaggaaggcggctgcgaactgcgcgtgaaattcagc |
| | | cgcagcgcagatgctccagcctaccagcaggggcagaa |
| | | ccagctctacaacgaactcaatcttggtcggagagagga |
| | | gtacgacgtgctggacaagcggagaggacgggaccca |
| | | gaaatgggcgggaagccgcgcagaaagaatccccaag |
| | | agggcctgtacaacgagctccaaaaggataagatggca |
| | | gaagcctatagcgagattggtatgaaaggggaacgcag |
| | | aagaggcaaaggccacgacggactgtaccagggactc |
| | | agcaccgccaccaaggacacctatgacgctcttcacatg |
| | | caggccctgccgcctcgg (SEQ ID NO: 1106) |
| SP-Linker 6- | MALPVTALLLPLALLLHAARPQ | atggccctccctgtcaccgccctgctgcttccgctggctcttc |
| ERmut2-Furin | SLALSLTADQMVSALLDAEPPI | tgctccacgccgctcggccccagTcgttggcactttccctg |
| cleavage site 2- | LYSEYDPTRPFSEASMMGLLT | actgccgaccagatggtgtccgcccttctggacgccgagc |
| BCMA CAR | NLADRELVHMINWAKRVPGF | ctccaattctgtactcggagtacgatccgactcgcccgttct |
| | VDLTLHDQVHLLECAWMEILM | ccgaagccagcatgatgggcctgttgactaacctggcgg |
| | IGLVWRSMEHPGKLLFAPNLL | accgcgagttggtgcacatgattaactgggctaagcgggt |
| | LDRNQGKCVEGGVEIFDMLLA | gccgggcttcgtggacctgaccctgcacgaccaagtgca |
| | TSSRFRMMNLQGEEFVCLKSI | cctcctggaatgcgcctggatggaaatcctcatgatcggcc |
| | ILLNSGVYTFLSSTLKSLEEKD | tcgtgtggagatccatggagcatcccggaaagctcctgttt |
| | HIHRVLDKITDTLIHLMAKAGLT | gcacccaacctcctgcttgatcgcaaccagggaaaatgc |
| | LQQQHQRLAQLLLILSHIRHM | gtggaagggggtgtcgagattttcgacatgctgctcgccac |
| | SNKRMEHLYSMKCKNVVPLS | ctcttcccggttccggatgatgaatctgcagggagaagagt |
| | DLLLEMLDAHRLGTGAEDPRP | tcgtgtgtctgaagtcaatcatcctgctgaactccggggtct |
| | SRKRRSLGDVGEVQLVESGG | ataccttcctgagctcgaccctcaagtcactggaggaaaa |
| | GLVQPGGSLRLSCAVSGFALS | agaccacatccatcgcgtgctcgataagatcaccgacac |
| | NHGMSWVRRAPGKGLEWVS | ccttatccatctcatggcgaaggctggactgaccctgcaac |
| | GIVYSGSTYYAASVKGRFTISR | agcagcaccagaggctggcccagttgctgctgattctgag |
| | DNSRNTLYLQMNSLRPEDTAI | ccacatccggcacatgtcgaacaagaggatggaacacc |
| | YYCSAHGGESDVWGQGTTVT | tgtacagcatgaagtgcaagaacgtcgtgcctctgtccgat |
| | VSSASGGGGSGGRASGGGG | ctgctcctggaaatgctggacgcgcacagactcggaacc |
| | SDIQLTQSPSSLSASVGDRVTI | ggcgcggaagacccccggccctccaggaagcgaaggt |
| | TCRASQSISSYLNWYQQKPG | ccctcggagacgtgggtgaagtgcaattggtggaatcag |
| | KAPKLLIYAASSLQSGVPSRFS | ggggaggacttgtgcagcctggaggatcgctgagactgtc |
| | GSGSGTDFTLTISSLQPEDFA | atgtgccgtgtccggctttgccctgtccaaccacgggatgtc |
| | TYYCQQSYSTPYTFGQGTKV | ctgggtccgccgcgcgcctggaaagggcctcgaatgggt |
| | EIKTTTPAPRPPTPAPTIASQP | gtcgggtattgtgtacagcggtagcacctactatgccgcat |
| | LSLRPEACRPAAGGAVHTRG | ccgtgaaggggagattcaccatcagccgggacaactcc |
| | LDFACDIYIWAPLAGTCGVLLL | aggaacactctgtacctccaaatgaattcgctgaggccag |
| | SLVITLYCKRGRKKLLYIFKQP | aggacactgccatctactactgctccgcgcatggcggaga |
| | FMRPVQTTQEEDGCSCRFPE | gtccgacgtctggggacaggggaccaccgtgaccgtgtc |
| | EEEGGCELRVKFSRSADAPA | tagcgcgtccggcggaggcggcagcgggggtcgggcat |
| | YQQGQNQLYNELNLGRREEY | cagggggcggcggatcggacatccagctcacccagtcc |
| | DVLDKRRGRDPEMGGKPRRK | ccgagctcgctgtccgcctccgtgggagatcgggtcacca |
| | NPQEGLYNELQKDKMAEAYS | tcacgtgccgcgccagccagtcgatttcctcctacctgaac |
| | EIGMKGERRRGKGHDGLYQG | tggtaccaacagaagcccggaaaagccccgaagcttctc |
| | LSTATKDTYDALHMQALPPR | atctacgccgcctcgagcctgcagtcaggagtgccctcac |
| | (SEQ ID NO: 1047) | ggttctccggctccggttccggtactgatttcaccctgaccat |
| | | ttcctccctgcaaccggaggacttcgctacttactactgcca |
| | | gcagtcgtactccaccccctacactttcggacaaggcacc |
| | | aaggtcgaaatcaagaccactaccccagcaccgaggcc |
| | | acccaccccggctcctaccatcgcctcccagcctctgtccc |
| | | tgcgtccggaggcatgtagacccgcagctggtggggccg |
| | | tgcatacccggggtcttgacttcgcctgcgatatctacatttg |
| | | ggcccctctggctggtacttgcggggtcctgctgctttcactc |
| | | gtgatcactctttactgtaagcgcggtcggaagaagctgct |
| | | gtacatctttaagcaacccttcatgaggcctgtgcagacta |
| | | ctcaagaggaggacggctgttcatgccggttcccagagg |
| | | aggaggaaggcggctgcgaactgcgcgtgaaattcagc |
| | | cgcagcgcagatgctccagcctaccagcaggggcagaa |
| | | ccagctctacaacgaactcaatcttggtcggagagagga |
| | | gtacgacgtgctggacaagcggagaggacgggaccca |
| | | gaaatgggcgggaagccgcgcagaaagaatccccaag |
| | | agggcctgtacaacgagctccaaaaggataagatggca |
| | | gaagcctatagcgagattggtatgaaaggggaacgcag |
| | | aagaggcaaaggccacgacggactgtaccagggactc |
| | | agcaccgccaccaaggacacctatgacgctcttcacatg |
| | | caggccctgccgcctcgg (SEQ ID NO: 1107) |
| SP-Linker 6- | MALPVTALLLPLALLLHAARPQ | atggccctccctgtcaccgccctgctgcttccgctggctcttc |
| ERmut1-Furin | SLALSLTADQMVSALLDAEPPI | tgctccacgccgctcggccccagTcgttggcactttccctg |
| cleavage site 3- | LYSEYDPTRPFSEASMMGLLT | actgccgaccagatggtgtccgcccttctggacgccgagc |
| BCMA CAR | NLADRELVHMINWAKRVPGF | ctccaattctgtactcggagtacgatccgactcgcccgttct |
| | VDLALHDQVHLLECAWMEILM | ccgaagccagcatgatgggcctgttgactaacctggcgg |
| | IGLVWRSMEHPGKLLFAPNLL | accgcgagttggtgcacatgattaactgggctaagcgggt |
| | LDRNQGKCVEGGVEIFDMLLA | gccgggcttcgtggacctggccctgcacgaccaagtgca |
| | TSSRFRMMNLQGEEFVCLKSI | cctcctggaatgcgcctggatggaaatcctcatgatcggcc |
| | ILLNSGVYTFLSSTLKSLEEKD | tcgtgtggagatccatggagcatcccggaaagctcctgttt |
| | HIHRVLDKITDTLIHLMAKAGLT | gcacccaacctcctgcttgatcgcaaccagggaaaatgc |
| | LQQQHQRLAQLLLILSHIRHM | gtggaagggggtgtcgagattttcgacatgctgctcgccac |
| | SSKRMEHLYSMKCKNVVPLS | ctcttcccggttccggatgatgaatctgcagggagaagagt |
| | DLLLEMLDAHRLGTGAEDPRP | tcgtgtgtctgaagtcaatcatcctgctgaactccggggtct |
| | SRKRREVQLVESGGGLVQPG | ataccttcctgagctcgaccctcaagtcactggaggaaaa |
| | GSLRLSCAVSGFALSNHGMS | agaccacatccatcgcgtgctcgataagatcaccgacac |
| | WVRRAPGKGLEWVSGIVYSG | ccttatccatctcatggcgaaggctggactgaccctgcaac |
| | STYYAASVKGRFTISRDNSRN | agcagcaccagaggctggcccagttgctgctgattctgag |
| | TLYLQMNSLRPEDTAIYYCSA | ccacatccggcacatgtcgtccaagaggatggaacacct |
| | HGGESDVWGQGTTVTVSSAS | gtacagcatgaagtgcaagaacgtcgtgcctctgtccgat |
| | GGGGSGGRASGGGGSDIQLT | ctgctcctggaaatgctggacgcgcacagactcGggacg |
| | QSPSSLSASVGDRVTITCRAS | ggagctgaagatccacgacccagcagaaagcgacggg |
| | QSISSYLNWYQQKPGKAPKLL | aagtgcaattggtggaatcagggggaggacttgtgcagc |
| | IYAASSLQSGVPSRFSGSGSG | ctggaggatcgctgagactgtcatgtgccgtgtccggctttg |
| | TDFTLTISSLQPEDFATYYCQ | ccctgtccaaccacgggatgtcctgggtccgccgcgcgcc |
| | QSYSTPYTFGQGTKVEIKTTT | tggaaagggcctcgaatgggtgtcgggtattgtgtacagc |
| | PAPRPPTPAPTIASQPLSLRPE | ggtagcacctactatgccgcatccgtgaaggggagattca |
| | ACRPAAGGAVHTRGLDFACDI | ccatcagccgggacaactccaggaacactctgtacctcc |
| | YIWAPLAGTCGVLLLSLVITLY | aaatgaattcgctgaggccagaggacactgccatctacta |
| | CKRGRKKLLYIFKQPFMRPVQ | ctgctccgcgcatggcggagagtccgacgtctggggaca |
| | TTQEEDGCSCRFPEEEEGGC | ggggaccaccgtgaccgtgtctagcgcgtccggcggag |
| | ELRVKFSRSADAPAYQQGQN | gcggcagcgggggtcgggcatcagggggcggcggatc |
| | QLYNELNLGRREEYDVLDKR | ggacatccagctcacccagtccccgagctcgctgtccgcc |
| | RGRDPEMGGKPRRKNPQEG | tccgtgggagatcgggtcaccatcacgtgccgcgccagc |
| | LYNELQKDKMAEAYSEIGMKG | cagtcgatttcctcctacctgaactggtaccaacagaagcc |
| | ERRRGKGHDGLYQGLSTATK | cggaaaagccccgaagcttctcatctacgccgcctcgag |
| | DTYDALHMQALPPR | cctgcagtcaggagtgccctcacggttctccggctccggtt |
| | (SEQ ID NO: 1048) | ccggtactgatttcaccctgaccatttcctccctgcaaccgg |
| | | aggacttcgctacttactactgccagcagtcgtactccacc |
| | | ccctacactttcggacaaggcaccaaggtcgaaatcaag |
| | | accactaccccagcaccgaggccacccaccccggctcct |
| | | accatcgcctcccagcctctgtccctgcgtccggaggcatg |
| | | tagacccgcagctggtggggccgtgcatacccggggtctt |
| | | gacttcgcctgcgatatctacatttgggcccctctggctggta |
| | | cttgcggggtcctgctgctttcactcgtgatcactctttactgta |
| | | agcgcggtcggaagaagctgctgtacatctttaagcaacc |
| | | cttcatgaggcctgtgcagactactcaagaggaggacgg |
| | | ctgttcatgccggttcccagaggaggaggaaggcggctg |
| | | cgaactgcgcgtgaaattcagccgcagcgcagatgctcc |
| | | agcctaccagcaggggcagaaccagctctacaacgaac |
| | | tcaatcttggtcggagagaggagtacgacgtgctggaca |
| | | agcggagaggacgggacccagaaatgggcgggaagc |
| | | cgcgcagaaagaatccccaagagggcctgtacaacga |
| | | gctccaaaaggataagatggcagaagcctatagcgaga |
| | | ttggtatgaaaggggaacgcagaagaggcaaaggcca |
| | | cgacggactgtaccagggactcagcaccgccaccaagg |
| | | acacctatgacgctcttcacatgcaggccctgccgcctcg |
| | | g (SEQ ID NO: 1108) |
| SP-Linker 6- | MALPVTALLLPLALLLHAARPQ | atggccctccctgtcaccgccctgctgcttccgctggctcttc |
| ERmut2-Furin | SLALSLTADQMVSALLDAEPPI | tgctccacgccgctcggccccagTcgttggcactttccctg |
| cleavage site 3- | LYSEYDPTRPFSEASMMGLLT | actgccgaccagatggtgtccgcccttctggacgccgagc |
| BCMA CAR | NLADRELVHMINWAKRVPGF | ctccaattctgtactcggagtacgatccgactcgcccgttct |
| | VDLTLHDQVHLLECAWMEILM | ccgaagccagcatgatgggcctgttgactaacctggcgg |
| | IGLVWRSMEHPGKLLFAPNLL | accgcgagttggtgcacatgattaactgggctaagcgggt |
| | LDRNQGKCVEGGVEIFDMLLA | gccgggcttcgtggacctgaccctgcacgaccaagtgca |
| | TSSRFRMMNLQGEEFVCLKSI | cctcctggaatgcgcctggatggaaatcctcatgatcggcc |
| | ILLNSGVYTFLSSTLKSLEEKD | tcgtgtggagatccatggagcatcccggaaagctcctgttt |
| | HIHRVLDKITDTLIHLMAKAGLT | gcacccaacctcctgcttgatcgcaaccagggaaaatgc |
| | LQQQHQRLAQLLLILSHIRHM | gtggaagggggtgtcgagattttcgacatgctgctcgccac |
| | SNKRMEHLYSMKCKNVVPLS | ctcttcccggttccggatgatgaatctgcagggagaagagt |
| | DLLLEMLDAHRLGTGAEDPRP | tcgtgtgtctgaagtcaatcatcctgctgaactccggggtct |
| | SRKRREVQLVESGGGLVQPG | ataccttcctgagctcgaccctcaagtcactggaggaaaa |
| | GSLRLSCAVSGFALSNHGMS | agaccacatccatcgcgtgctcgataagatcaccgacac |
| | WVRRAPGKGLEWVSGIVYSG | ccttatccatctcatggcgaaggctggactgaccctgcaac |
| | STYYAASVKGRFTISRDNSRN | agcagcaccagaggctggcccagttgctgctgattctgag |
| | TLYLQMNSLRPEDTAIYYCSA | ccacatccggcacatgtcgaacaagaggatggaacacc |
| | HGGESDVWGQGTTVTVSSAS | tgtacagcatgaagtgcaagaacgtcgtgcctctgtccgat |
| | GGGGSGGRASGGGGSDIQLT | ctgctcctggaaatgctggacgcgcacagactcgggacg |
| | QSPSSLSASVGDRVTITCRAS | ggagctgaagatccacgacccagcagaaagcgacggg |
| | QSISSYLNWYQQKPGKAPKLL | aagtgcaattggtggaatcagggggaggacttgtgcagc |
| | IYAASSLQSGVPSRFSGSGSG | ctggaggatcgctgagactgtcatgtgccgtgtccggctttg |
| | TDFTLTISSLQPEDFATYYCQ | ccctgtccaaccacgggatgtcctgggtccgccgcgcgcc |
| | QSYSTPYTFGQGTKVEIKTTT | tggaaagggcctcgaatgggtgtcgggtattgtgtacagc |
| | PAPRPPTPAPTIASQPLSLRPE | ggtagcacctactatgccgcatccgtgaaggggagattca |
| | ACRPAAGGAVHTRGLDFACDI | ccatcagccgggacaactccaggaacactctgtacctcc |
| | YIWAPLAGTCGVLLLSLVITLY | aaatgaattcgctgaggccagaggacactgccatctacta |
| | CKRGRKKLLYIFKQPFMRPVQ | ctgctccgcgcatggcggagagtccgacgtctggggaca |
| | TTQEEDGCSCRFPEEEEGGC | ggggaccaccgtgaccgtgtctagcgcgtccggcggag |
| | ELRVKFSRSADAPAYQQGQN | gcggcagcgggggtcgggcatcagggggcggcggatc |
| | QLYNELNLGRREEYDVLDKR | ggacatccagctcacccagtccccgagctcgctgtccgcc |
| | RGRDPEMGGKPRRKNPQEG | tccgtgggagatcgggtcaccatcacgtgccgcgccagc |
| | LYNELQKDKMAEAYSEIGMKG | cagtcgatttcctcctacctgaactggtaccaacagaagcc |
| | ERRRGKGHDGLYQGLSTATK | cggaaaagccccgaagcttctcatctacgccgcctcgag |
| | DTYDALHMQALPPR | cctgcagtcaggagtgccctcacggttctccggctccggtt |
| | (SEQ ID NO: 1049) | ccggtactgatttcaccctgaccatttcctccctgcaaccgg |
| | | aggacttcgctacttactactgccagcagtcgtactccacc |
| | | ccctacactttcggacaaggcaccaaggtcgaaatcaag |
| | | accactaccccagcaccgaggccacccaccccggctcct |
| | | accatcgcctcccagcctctgtccctgcgtccggaggcatg |
| | | tagacccgcagctggtggggccgtgcatacccggggtctt |
| | | gacttcgcctgcgatatctacatttgggcccctctggctggta |
| | | cttgcggggtcctgctgctttcactcgtgatcactctttactgta |
| | | agcgcggtcggaagaagctgctgtacatctttaagcaacc |
| | | cttcatgaggcctgtgcagactactcaagaggaggacgg |
| | | ctgttcatgccggttcccagaggaggaggaaggcggctg |
| | | cgaactgcgcgtgaaattcagccgcagcgcagatgctcc |
| | | agcctaccagcaggggcagaaccagctctacaacgaac |
| | | tcaatcttggtcggagagaggagtacgacgtgctggaca |
| | | agcggagaggacgggacccagaaatgggcgggaagc |
| | | cgcgcagaaagaatccccaagagggcctgtacaacga |
| | | gctccaaaaggataagatggcagaagcctatagcgaga |
| | | ttggtatgaaaggggaacgcagaagaggcaaaggcca |
| | | cgacggactgtaccagggactcagcaccgccaccaagg |
| | | acacctatgacgctcttcacatgcaggccctgccgcctcg |
| | | g (SEQ ID NO: 1109) |

### Example 29: Temporally Controlled Total B Cell Depletion

[1028] The materials and methods employed in these experiments are now described.

[1029] Construction of CAR constructs including suicide genes. Constructs using the FMC63 (anti-CD19) single-chain variable fragment (scFv) used the previously described vector (pRRLSIN.cPPT.gene-of interest-WPRE with a human EF1alpha promoter), which was modified for caspase-9 expression as follows:
[1030] 1. For expression of the inducible caspase-9 3′ of the FMC63-bbz CAR, the transmembrane domain and the cytoplasmic tail were removed by digestion with EcoRV and SalI and replaced with a geneblock (IDT), that encoded the same transmembrane domain and cytoplasmic tail followed by a 2A site and FKBP12F36V followed by a short GS-linker and the caspase-9 promolecule domain.
[1031] 2. For expression of the inducible caspase-9 5′ of the FMC63-bbz CAR, the signal peptide and the part of FMC63 ScFv were removed by digestion with XbaI and Tth111I and replaced with a geneblock (IDT), that encoded the same inducible caspase-9 domain as described in 1. followed by a 2A site and the sequence encoding the previously removed part of the original plasmid.
[1032] 3. For expression of the reversible caspase-9 3′ of the FMC63-bbz CAR, the transmembrane domain and the cytoplasmic tail were removed by digestion with EcoRV and SalI and replaced with a geneblock (geneart, Thermofisher), that encoded the same transmembrane domain and cytoplasmic tail followed by a 2A site and 2 repeats of FKBP12F36M followed by a short GS-linker (SGGGS, SEQ ID NO:3036) and the caspase-9 promolecule domain.
[1033] 4. For expression of an anti-human CD20 ScFv, the FMC63 ScFv and the CD8 hinge were removed from the constructs described in 1-3 and replaced with a codon-optimized gene block (IDT) encoding the amino acid sequence of veltuzumab.

[1034] Construction of CAR constructs including conditional aggregation domains. For expression of the conditional aggregation domains 5′ of the FMC63-bbz CAR, the plasmid was cut with BamHI between signal peptide and ScFv and a gene block encoding (geneart) 4 repeats of FKBP12F36M followed by a furin recognition sequence were inserted between signal peptide and ScFv.

[1035] Lentiviral production. VSV-G pseudotyped lentiviral particles were produced using a 4th generation packaging system. 293T cells were transfected at a confluency of 90% with a mixture of the pRRLSIN.cPPT.EF1α-gene-of-interest.WPRE, the envelope plasmid pMD2.G (Addgene #12252), the packaging plasmids pRSVRev (Addgene #12253) and pMDLgm/pRRE (Addgene #12251) in a complex with Lipofectamine 2000 (Life Technologies). Lentivirus containing supernatant was harvested after 24 and 48 hours, filtered through a 0.4 micron PES membrane, concentrated at 12,000×g for 12 hours at 4° C. and stored at −80° C.

[1036] Stimulation and expansion of primary human T cells. Primary human T cells were cultured in RPMI1640, 10% FBS, 10 mM HEPES, 1% penicillin/streptomycin. Bulk T cells (CD4⁺ and CD8⁺) were stimulated with anti-CD3 and anti-CD28 beads (Dynabeads, Life Technologies) at a bead:cell ratio of 3:1. The culture medium was supplemented with 100 IU/mL interleukin 2. 24 hours after stimulation, 10⁶ T cells were transduced with lentiviral particles encoding various CAR constructs or control constructs or mock transduced. Expansion of the T cells was monitored for 8-12 days by measurement of cell volume and concentration (Coulter counter, Beckman Coulter). Cell surface expression of the CAR constructs was validated by flow cytometry (BD LSRII) with polyconal antibodies against the human or mouse heavy and light chain. CAR staining was performed for 25 minutes at room temperature. All staining procedures were performed under saturating conditions. For some experiments, transduced T cells were previously frozen in 90% FBS and 10% DMSO. Experiments were performed when cells were rested after stimulation (i.e. volume of <450 fl).

[1037] In vitro cytotoxicity and cytokine assays. In vitro killing of Nalm-6 cells was tested with a ⁵¹Cr-release assay. 5×10⁵ target cells were loaded with 50 □Ci of Na₂⁵¹CrO₄ (Perkin Elmer) for 90-120 minutes, washed twice and resuspended in phenol red-free medium with 5% FBS. CAR, control CAR, or mock transduced T cells (8-10 days after initial activation) were co-incubated with loaded target cells for 4 hours at various effector:target (E:T) ratios, and chromium release into the supernatant was measured with a MicroBeta2 plate counter (Perkin Elmer). Spontaneous release by target cells (without effector cells) was analyzed in the same volume, and maximum release was assessed by lysing target cells with SDS at a final concentration of 5%. Percent specific lysis=[(Experimental Release−Spontaneous Release)/(Maximum Release−Spontaneous Release)]*100. All experiments were performed with at least 3 replicates.

[1038] Elimination of CD19 CAR T cells. CD19 sCAR T cells were incubated in the presence of the indicated concentrations AP20187 for 16 hours at 37° C. Dead cells were detected with live/dead-violet dye and quantified by flow cytometry.

[1039] CD19 sCAR T Cells Retain Biologic Efficacy In Vivo. Mice were pretreated with IVIG (Privigen, CSL Behring) at a dose of 600 mg/kg i.v. for 2 days in order to block Fc□Rs on monocytes and neutrophils. NSG mice were then injected with 1×10⁶ CD19+ Nalm6 cells expressing click-beetle luciferase to allow for bioluminescence detection. Five days later, mice were treated either with 5×10⁶ CD19 CAR T cells that express an inducible caspase9 or with nontransduced control T cells. Peripheral blood was obtained by retro-orbital bleeding, and the presence of B cells and T-cell engraftment was determined by flow cytometry using BD TruCOUNT (BD Biosciences) tubes as described in the manufacturer's instructions. Bioluminescence was assessed on day 5, 6, 7, 10, 13 and 18 after B cell injection, which was combined with intraperitoneally administered IVIG (600 mg/kg). Mice were euthanized for organ harvest according to local IACUC guidelines, and bone marrow, spleen and blood samples were assessed by flow cytometry.

[1040] The results of the experiments are now described.

[1041] B cell depletion, if 100% complete, should be curative in pemphigus vulgaris (PV) and other antibody-mediated diseases, because the pathogenic B cells should be eliminated, and a brand new B cell repertoire must form. Given the multiple tolerance checkpoints that prevent autoimmunity, it is unlikely that B cell autoreactivity will recur.

[1042] The advantage of the CD19 CAR T cell approach is that it is a universal approach to the treatment of any B cell or antibody-mediated disease and has been validated in human clinical trials to be highly effective at CD19⁺ B cell depletion. Thus, the target antigen for the disease does not need to be known. This therapeutic approach could be applied to any disease in which B cells or the antibodies they produce cause autoimmunity or disease. In addition, the CD19 CAR could be used to eliminate alloantibodies to non-self proteins that prevent functional rescue of genetic diseases, such as HLA or beta2 microglobulin antibodies from organ transplant, blood group or Rh antibodies from transfusion or pregnancy, or Factor VIII, α-L-iduronidase, and many other protein replacement therapies in clinical use or development.

[1043] CD19 CAR T cells have shown efficacy for B cell depletion in human clinical trials without significant off-target cytotoxicity, although B cell depletion is permanent, resulting in lifelong immunosuppression. CD20 is also a clinical target for B cell depletion. Thus, the incorporation of a suicide gene into the anti-CD19 or anti-CD20 CAR design (sCAR), or selective activation of CAR-T function (via a reversible suicide casssette or conditional expression of the CAR), will allow temporal control of CAR-mediated B cell depletion as an important safety measure.

[1044] An example of a suicide gene in a sCAR includes fusion of human caspase 9 to a modified human FK-binding protein, which allows conditional dimerization upon exposure to a synthetic dimerizing drug such as AP1903. Upon dimerization caspase 9 becomes activated, leading to death of cells expressing the suicide gene. Thus, infusion of CD19 sCAR T cells would result in complete B cell depletion, which would cure B cell- or antibody-mediated disease. Subsequent activation of the suicide gene with AP1903, AP20187, or similar agent would then eliminate the sCAR T cells, allowing B cell repopulation to occur, thereby regenerating normal immune function. An example of a reverse suicide gene in a revCAR includes fusion of human caspase 9 to a modified human FK-binding protein, whose default state is to dimerize and cause death of cells expressing the suicide gene. Upon solubilization of dimerization domains, caspase 9 activity is inhibited and cell death is prevented, allowing CAR T cell function to occur. An example of a regulatory on-CAR system includes fusion of the CAR to modified human FK-binding protein domains, whose default state is to dimerize and cause aggregation and degradation of proteins in the secretory system of the cell. Solubilization of the dimerization domains allows egress and processing of the CAR in the secretory system of the cell, including furin cleavage of the CAR from the FKBP domains to allow functional cell surface expression of the CAR.

[1045] To evaluate these approaches for temporal control of CAR T cell function, several constructs were engineered; for one embodiment, one with a suicide gene in front of the CAR and one with the suicide gene after the CAR construct (FIG. 27). For another embodiment, a reverse suicide gene (either in front of or after the CAR construct) (FIG. 28). For yet another embodiment, a regulatory onCAR (FIG. 26). Primary human T cells were shown to efficiently express the CD19 sCARs, CD19 revCAR, and CD20 CAR (FIGS. 29A-29F) and CD19 sCAR T cells demonstrated specific cytotoxicity against their intended targets (FIG. 30). Additionally, primary human T cells expressing the CD19 sCAR were specifically killed by activation of the suicide switch with AP20187 in vitro, whereas nontransduced T cells showed no cell death after AP20187 treatment (FIG. 31). Additionally, CD19 sCAR T cells remained effective at eliminating CD19⁺ B cells in an in vivo mouse model (FIG. 32) and demonstrated engraftment (FIG. 33).

[1046] As seen in the killing assay in FIG. 34, CD20sCAR, 20revCAR and CD20 onCAR show equivalent and specific killing of the CD20+ target cells. On-CAR was tested in presence of 500 nM Shield-1.

[1047] As seen in FIG. 35, the absence of solubilizing FKBP ligand (e.g. shield-1) inhibits CAR function. At lower E:T ratio's the On-CAR function is strongly inhibited if no FKBP ligand is present.

[1048] As seen in FIG. 36, the CAR surface expression could be modulated with FKBP ligand Shield-1. Shield-1 resulted in a dose-dependent increase in CAR expression while the absence of Shield-1 resulted in ˜60% reduction of CD20 on-CAR expression.

[1049] As seen in FIG. 37, Shield-1 was titrated in CD19rev CAR system and lower doses of Shield-1 resulted in higher caspase-9 activation and increased apoptosis.

[1050] As seen in FIG. 38, the in vivo assessment of apoptosis efficiency in anti CD19 revCAR T cells indicated a sufficient in vivo apoptosis of revCAR T cells (FIG. 38). The in vivo efficacy of CD19 revCAR T cells was also evaluated (FIG. 39).

[1051] As seen in FIGS. 40, 41 and 42, the suicide gene activation resulted in peripheral depletion of the suicide CAR T cells (e.g. depletion of sCAR T cells from lymphoid organs in FIG. 42).

[1052] The timeline for T cell production of the present invention is outlined in a schematic in FIG. 43 and the timeline of the experimental design of the in vivo experiment of the present invention is outlined in a schematic in FIG. 44.

[1053] As shown in FIG. 45, ‘Universal’ sCAR T cells can deplete peripheral B cells in non-autologous BT mice and human B cells in a non-cancer humanized mouse model. Furthermore, FIG. 46 demonstrates that the universal sCAR T cells can be depleted with AP1903 treatment.

[1054] The relevant sequences of the some experimental results presented herein are as follows:

CD19 sCAR:
Suicide gene followed by CD19 CAR (nt)
Suicide gene followed by CD19 CAR (aa)
CD19 CAR followed by suicide gene (nt)
CD19 CAR followed by suicide gene (aa)
CD20 CAR and sCAR:
CD20bbz CAR (nt and aa)
CD20 CAR followed by suicide gene (nt and aa)
suicide gene followed by CD20 CAR (nt and aa)
CD19 revCAR:
CD19 CAR followed by reversible suicide cassette (nt and aa)
CD19 onCAR:
CD19 on-CAR (nt and aa)
CD20 revCAR:
CD20 CAR followed by reversible suicide cassette (nt and aa)
CD20 onCAR:
CD20 on-CAR (nt and aa)
Suicide gene = inducible caspase9 (activates apoptosis upon dimerization with
small molecule activators)
2A site = ribosome skipping site
CD19 CAR, comprising a CD8 transmembrane domain, CD137 and CD3-zeta (CD3-zeta is also known
as CD247, collectively the CD137-CD3zeta is also known as bbz) cytoplasmic signaling domains

[chemical structure]

(SEQ ID NO: 3018)
ATGCTCGAGGGGGTTCAGGTGGAGACTATCAGCCCGGGCGACGGACGGACATTCCCAAAGCGCGGGCAGACGT
GTGTGGTGCATTACACCGGGATGCTTGAGGACGGAAAGAAAGTGGACTCTTCCCGAGACCGAAATAAACCATT
CAAGTTCATGTTGGGCAAGCAGGAGGTTATCAGAGGGTGGGAGGAGGGCGTCGCTCAGATGAGTGTCGGACA
GAGGGCCAAGCTCACGATCTCCCCTGATTACGCCTACGGGGCAACTGGTCACCCCGGAATCATCCCCCCTCACGC
AACCCTCGTGTTCGACGTCGAGCTGCTCAAACTGGAATCAGGCGGAGGCAGTGGCGCTAGCGGGTTTGGCGAT
GTCGGTGCCCTTGAAAGCTTGAGAGGAAATGCCGATCTCGCTTACATCTTGAGCATGGAGCCCTGTGGGCACTG
TCTGATCATCAACAATGTTAACTTTTGCCGGGAGTCCGGCCTGCGCACACGCACAGGCTCCAACATTGACTGCGA
AAAACTTCGAAGGAGGTTTAGCTCTCTGCATTTCATGGTAGAGGTGAAGGGGGATCTGACCGCCAAGAAAATG
GTTCTCGCCCTTCTCGAGCTTGCGCAGCAGGACCATGGAGCGCTTGACTGTTGTGTCGTTGTGATACTGAGCCAT
GGCTGTCAGGCTTCCCATCTCCAGTTTCCAGGGGCCGTGTACGGAACCGATGGATGCCCTGTGTCAGTTGAAAA
GATCGTAAACATCTTTAACGGAACATCTTGCCCGAGCCTCGGCGGTAAACCGAAGCTTTTTTTTATCCAGGCCTG
CGGCGGTGAACAGAAAGATCATGGCTTCGAGGTTGCCAGTACCAGCCCTGAAGACGAATCCCCCGGGTCAAAT
CCTGAACCAGATGCGACCCCTTTCCAGGAAGGACTCCGCACTTTTGACCAGCTTGACGCCATTTCCTCCCTGCCAA
CACCTTCCGACATATTTGTAAGCTACTCCACCTTTCCAGGATTCGTGAGCTGGCGCGACCCAAAATCCGGCAGTT
GGTATGTTGAAACCCTGGACGATATTTTCGAACAATGGGCCCACAGTGAGGACCTGCAGTCCCTTCTTCTGCGCG
TAGCCAATGCCGTGTCAGTCAAAGGGATTTACAAGCAGATGCCAGGCTGCTTTAATTTCCTGCGCAAGAAACTG

[chemical structure]

[chemical structure]

GATGACACAGACTACATCCTCCCTGTCTGCCTCTCTGGGAGACAGAGTCACCATCAGTTGCAGGGCAAGTCAGGAC
ATTAGTAAATATTTAAATTGGTATCAGCAGAAACCAGATGGAACTGTTAAACTCCTGATCTACCATACATCAAGATT
ACACTCAGGAGTCCCATCAAGGTTCAGTGGCAGTGGGTCTGGAACAGATTATTCTCTCACCATTAGCAACCTGGAG
CAAGAAGATATTGCCACTTACTTTTGCCAACAGGGTAATACGCTTCCGTACACGTTCGGAGGGGGGACTAAGTTGG
AAATAACAGGTGGCGGTGGCTCGGGCGGTGGTGGGTCGGGTGGCGGCGGATCTGAGGTGAAACTGCAGGAGTC
AGGACCTGGCCTGGTGGCGCCCTCACAGAGCCTGTCCGTCACATGCACTGTCTCAGGGGTCTCATTACCCGACTAT
GGTGTAAGCTGGATTCGCCAGCCTCCACGAAAGGGTCTGGAGTGGCTGGGAGTAATATGGGGTAGTGAAACCAC
ATACTATAATTCAGCTCTCAAATCCAGACTGACCATCATCAAGGACAACTCCAAGAGCCAAGTTTTCTTAAAAATGA
ACAGTCTGCAAACTGATGACACAGCCATTTACTACTGTGCCAAACATTATTACTACGGTGGTAGCTATGCTATGGAC
TACTGGGGTCAAGGAACCTCAGTCACCGTCTCCTCAACCACGACGCCAGCGCCGCGACCACCAACACCGGCGCCCA
CCATCGCGTCGCAGCCCCTGTCCCTGCGCCCAGAGGCGTGCCGGCCAGCGGCGGGGGGCGCAGTGCACACGAGG
GGGCTGGACTTCGCCTGTGATATCTACATCTGGGCGCCCTTGGCCGGGACTTGTGGGGTCCTTCTCCTGTCACTGGT
TATCACCCTTTACTGCAAACGGGGCAGAAAGAAACTCCTGTATATATTCAAACAACCATTTATGAGACCAGTACAAA
CTACTCAAGAGGAAGATGGCTGTAGCTGCCGATTTCCAGAAGAAGAAGAAGGAGGATGTGAACTGAGAGTGAAG
TTCAGCAGGAGCGCAGACGCCCCCGCGTACCAGCAGGGCCAGAACCAGCTCTATAACGAGCTCAATCTAGGACGA
AGAGAGGAGTACGATGTTTTGGACAAGAGACGTGGCCGGGACCCTGAGATGGGGGGAAAGCCGAGAAGGAAGA
ACCCTCAGGAAGGCCTGTACAATGAACTGCAGAAAGATAAGATGGCGGAGGCCTACAGTGAGATTGGGATGAAA
GGCGAGCGCCGGAGGGGCAAGGGGCACGATGGCCTTTACCAGGGTCTCAGTACAGCCACCAAGGACACCTACGA
CGCCCTTCACATGCAGGCCCTGCCCCCTCGCTAA

[chemical structure]

(SEQ ID NO: 3019)
MLEGVQVETISPGDGRTFPKRGQTCVVHYTGMLEDGKKVDSSRDRNKPFKFMLGKQEVIRGWEEGVAQMSVGQ
RAKLTISPDYAYGATGHPGIIPPHATLVFDVELLKLESGGGSGASGFGDVGALESLRGNADLAYILSMEPCGHCLIINN
VNFCRESGLRTRTGSNIDCEKLRRRFSSLHFMVEVKGDLTAKKMVLALLELAQQDHGALDCCVVVILSHGCQASHLQ
FPGAVYGTDGCPVSVEKIVNIFNGTSCPSLGGKPKLFFIQACGGEQKDHGFEVASTSPEDESPGSNPEPDATPFQEGL
RTFDQLDAISSLPTPSDIFVSYSTFPGFVSWRDPKSGSVVYVETLDDIFEQWAHSEDLQSLLLRVANAVSVKGIYKQMP

[chemical structure]

RASQDISKYLNWYQQKPDGTVKLLIYHTSRLHSGVPSRFSGSGSGTDYSLTISNLEQEDIATYFCQQGNTLPYTFGGGTKL
EITGGGGSGGGGSGGGGSEVKLQESGPGLVAPSQSLSVTCTVSGVSLPDYGVSWIRQPPRKGLEWLGVIWGSETTYYN
SALKSRLTIIKDNSKSQVFLKMNSLQTDDTAIYYCAKHYYYGGSYAMDYWGQGTSVTVSSTTTPAPRPPTPAPTIASQPL
SLRPEACRPAAGGAVHTRGLDFACDIYIWAPLAGTCGVLLLSLVITLYCKRGRKKLLYIFKQPFMRPVQTTQEEDGCSCRF
PEEEEGGCELRVKFSRSADAPAYQQGQNQLYNELNLGRREEYDVLDKRRGRDPEMGGKPRRKNPQEGLYNELQKDK
[sequence omitted]

[chemical structure]

(SEQ ID NO: 3020)
ATGGCCTTACCAGTGACCGCCTTGCTCCTGCCGCTGGCCTTGCTGCTCCACGCCGCCAGGCCGGACATCCAGATGAC
ACAGACTACATCCTCCCTGTCTGCCTCTCTGGGAGACAGAGTCACCATCAGTTGCAGGGCAAGTCAGGACATTAGT
AAATATTTAAATTGGTATCAGCAGAAACCAGATGGAACTGTTAAACTCCTGATCTACCATACATCAAGATTACACTC
AGGAGTCCCATCAAGGTTCAGTGGCAGTGGGTCTGGAACAGATTATTCTCTCACCATTAGCAACCTGGAGCAAGAA
GATATTGCCACTTACTTTTGCCAACAGGGTAATACGCTTCCGTACACGTTCGGAGGGGGGACTAAGTTGGAAATAA
CAGGTGGCGGTGGCTCGGGCGGTGGTGGGTCGGGTGGCGGCGGATCTGAGGTGAAACTGCAGGAGTCAGGACC
TGGCCTGGTGGCGCCCTCACAGAGCCTGTCCGTCACATGCACTGTCTCAGGGGTCTCATTACCCGACTATGGTGTA
AGCTGGATTCGCCAGCCTCCACGAAAGGGTCTGGAGTGGCTGGGAGTAATATGGGGTAGTGAAACCACATACTAT
AATTCAGCTCTCAAATCCAGACTGACCATCATCAAGGACAACTCCAAGAGCCAAGTTTTCTTAAAAATGAACAGTCT
GCAAACTGATGACACAGCCATTTACTACTGTGCCAAACATTATTACTACGGTGGTAGCTATGCTATGGACTACTGG
GGTCAAGGAACCTCAGTCACCGTCTCCTCAACCACGACGCCAGCGCCGCGACCACCAACACCGGCGCCCACCATCG
CGTCGCAGCCCCTGTCCCTGCGCCCAGAGGCGTGCCGGCCAGCGGCGGGGGGCGCAGTGCACACGAGGGGGCTG
GACTTCGCCTGTGATATCTACATCTGGGCGCCCTTGGCCGGGACTTGTGGGGTCCTTCTCCTGTCACTGGTTATCAC
CCTTTACTGCAAACGGGGCAGAAAGAAACTCCTGTATATATTCAAACAACCATTTATGAGACCAGTACAAACTACTC
AAGAGGAAGATGGCTGTAGCTGCCGATTTCCAGAAGAAGAAGAAGGAGGATGTGAACTGAGAGTGAAGTTCAGC
AGGAGCGCAGACGCCCCCGCGTACCAGCAGGGCCAGAACCAGCTCTATAACGAGCTCAATCTAGGACGAAGAGA
GGAGTACGATGTTTTGGACAAGAGACGTGGCCGGGACCCTGAGATGGGGGGAAAGCCGAGAAGGAAGAACCCT
CAGGAAGGCCTGTACAATGAACTGCAGAAAGATAAGATGGCGGAGGCCTACAGTGAGATTGGGATGAAAGGCG
AGCGCCGGAGGGGCAAGGGGCACGATGGCCTTTACCAGGGTCTCAGTACAGCCACCAAGGACACCTACGACGCCC
TTCACATGCAGGCCCTGCCCCCTCGCTCGGAAGCGACGGGGCTCCGGCGCAACAAATTTCTCCTTGCTGAAACAGG

[chemical structure]

CCAAAGCGCGGGCAGACGTGTGTGGTGCATTACACCGGGATGCTTGAGGACGGAAAGAAAGTGGACTCTTCCC
GAGACCGAAATAAACCATTCAAGTTCATGTTGGGCAAGCAGGAGGTTATCAGAGGGTGGGAGGAGGGCGTCG
CTCAGATGAGTGTCGGACAGAGGGCCAAGCTCACGATCTCCCCTGATTACGCCTACGGGGCAACTGGTCACCCC
GGAATCATCCCCCCTCACGCAACCCTCGTGTTCGACGTCGAGCTGCTCAAACTGGAATCAGGCGGAGGCAGTGG
CGGGTTTGGCGATGTCGGTGCCCTTGAAAGCTTGAGAGGAAATGCCGATCTCGCTTACATCTTGAGCATGGAGC
CCTGTGGGCACTGTCTGATCATCAACAATGTTAACTTTTGCCGGGAGTCCGGCCTGCGCACACGCACAGGCTCCA
ACATTGACTGCGAAAAACTTCGAAGGAGGTTTAGCTCTCTGCATTTCATGGTAGAGGTGAAGGGGGATCTGACC
GCCAAGAAAATGGTTCTCGCCCTTCTCGAGCTTGCGCAGCAGGACCATGGAGCGCTTGACTGTTGTGTCGTTGTG
ATACTGAGCCATGGCTGTCAGGCTTCCCATCTCCAGTTTCCAGGGGCCGTGTACGGAACCGATGGATGCCCTGTG
TCAGTTGAAAAGATCGTAAACATCTTTAACGGAACATCTTGCCCGAGCCTCGGCGGTAAACCGAAGCTTTTTTTT
ATCCAGGCCTGCGGCGGTGAACAGAAAGATCATGGCTTCGAGGTTGCCAGTACCAGCCCTGAAGACGAATCCCC
CGGGTCAAATCCTGAACCAGATGCGACCCCTTTCCAGGAAGGACTCCGCACTTTTGACCAGCTTGACGCCATTTC
CTCCCTGCCAACACCTTCCGACATATTTGTAAGCTACTCCACCTTTCCAGGATTCGTGAGCTGGCGCGACCCAAAA
TCCGGCAGTTGGTATGTTGAAACCCTGGACGATATCTTCGAACAATGGGCCCACAGTGAGGACCTGCAGTCCCTT
CTTCTGCGCGTAGCCAATGCCGTGTCAGTCAAAGGGATTTACAAGCAGATGCCAGGCTGCTTTAATTTCCTGCGC
AAGAAACTGTTTTTTAAGACCAGTTGAGTCGACGGAGGAGGAG

[chemical structure]

(SEQ ID NO: 3021)
MALPVTALLLPLALLLHAARPDIQMTQTTSSLSASLGDRVTISCRASQDISKYLNWYQQKPDGTVKLLIYHTSRLHSGVPS
RFSGSGSGTDYSLTISNLEQEDIATYFCQQGNTLPYTFGGGTKLEITGGGGSGGGGSGGGGSEVKLQESGPGLVAPSQSL
SVTCTVSGVSLPDYGVSWIRQPPRKGLEWLGVIWGSETTYYNSALKSRLTIIKDNSKSQVFLKMNSLQTDDTAIYYCAKH
YYYGGSYAMDYWGQGTSVTVSSTTTPAPRPPTPAPTIASQPLSLRPEACRPAAGGAVHTRGLDFACDIYIWAPLAGTCG
VLLLSLVITLYCKRGRKKLLYIFKQPFMRPVQTTQEEDGCSCRFPEEEEGGCELRVKFSRSADAPAYQQGQNQLYNELNL
GRREEYDVLDKRRGRDPEMGGKPRRKNPQEGLYNELQKDKMAEAYSEIGMKGERRRGKGHDGLYQGLSTATKDTYD

[chemical structure]

DRNKPFKFMLGKQEVIRGWEEGVAQMSVGQRAKLTISPDYAYGATGHPGIIPPHATLVFDVELLKLESGGGSGGFG
DVGALESLRGNADLAYILSMEPCGHCLIINNVNFCRESGLRTRTGSNIDCEKLRRRFSSLHFMVEVKGDLTAKKMVLA
LLELAQQDHGALDCCVVVILSHGCQASHLQFPGAVYGTDGCPVSVEKIVNIFNGTSCPSLGGKPKLFFIQACGGEQKD
HGFEVASTSPEDESPGSNPEPDATPFQEGLRTFDQLDAISSLPTPSDIFVSYSTFPGFVSWRDPKSGSWYVETLDDIFE
QWAHSEDLQSLLLRVANAVSVKGIYKQMPGCFNFLRKKLFFKTS

[chemical structure]

(SEQ ID NO: 3022)

[chemical structure]

AACTTACACAGTCCCCTAGTTCCTTGTCCGCCTCCGTCGGCGACAGAGTTACCATGACTTGTCGAGCGTCTTCTAGC
GTTTCCTACATTCATTGGTTCCAACAGAAGCCCGGAAAGGCACCAAAACCTTGGATCTACGCCACGTCCAATTTGG
CTAGTGGTGTTCCGGTGCGATTTTCCGGGTCAGGTAGCGGGACGGACTATACTTTTACCATTTCAAGCCTTCAGCC
TGAAGACATCGCGACGTACTATTGTCAGCAGTGGACCTCTAACCCTCCTACCTTTGGCGGTGGAACAAAGCTGGA
GATCAAACGAGGCGGGGGTGGCTCTGGGGGAGGAGGTTCCGGTGGGGGAGGCTCTCAAGTACAACTGCAACAA
AGTGGGGCTGAAGTGAAGAAGCCCGGTTCTTCAGTCAAAGTATCATGTAAGGCAAGTGGTTATACTTTTACGTCTT
ATAACATGCATTGGGTAAAGCAAGCCCCTGGTCAGGGCCTCGAGTGGATTGGTGCGATCTACCCTGGAATGGGTG
ATACGAGCTATAATCAGAAATTCAAGGGGAAAGCCACCTTGACTGCAGACGAATCTACGAACACGGCTTACATGG
AGCTTAGCTCACTCAGATCAGAGGATACAGCCTTTTACTACTGCGCTAGATCAACTTATTACGGAGGAGACTGGTA
TTTTGATGTATGGGGTCAGGGGACCACAGTCACTGTTAGCTCTGCTAGCACCACGACGCCAGCGCCGCGACCACC
AACACCGGCGCCCACCATCGCGTCGCAGCCCCTGTCCCTGCGCCCAGAGGCGTGCCGGCCAGCGGCGGGGGGCG
CAGTGCACACGAGGGGGCTGGACTTCGCCTGTGATTCCGGAATCTACATCTGGGCGCCCTTGGCCGGGACTTGTG
GGGTCCTTCTCCTGTCACTGGTTATCACCCTTTACTGCAAACGGGGCAGAAAGAAACTCCTGTATATATTCAAACAA
CCATTTATGAGACCAGTACAAACTACTCAAGAGGAAGATGGCTGTAGCTGCCGATTTCCAGAAGAAGAAGAAGGA
GGATGTGAACTGAGAGTGAAGTTCAGCAGGAGCGCAGACGCCCCCGCGTACCAGCAGGGCCAGAACCAGCTCTA
TAACGAGCTCAATCTAGGACGAAGAGAGGAGTACGATGTTTTGGACAAGAGACGTGGCCGGGACCCTGAGATGG
GGGGAAAGCCGAGAAGGAAGAACCCTCAGGAAGGCCTGTACAATGAACTGCAGAAAGATAAGATGGCGGAGGC
CTACAGTGAGATTGGGATGAAAGGCGAGCGCCGGAGGGGCAAGGGGCACGATGGCCTTTACCAGGGTCTCAGTA
CAGCCACCAAGGACACCTACGACGCCCTTCACATGCAGGCCCTGCCCCCTCGC

[chemical structure]

(SEQ ID NO: 3023)

[chemical structure]

GVPVRFSGSGSGTDYTFTISSLQPEDIATYYCQQVVTSNPPTFGGGTKLEIKRGGGGSGGGGSGGGGSQVQLQQSGA
EVKKPGSSVKVSCKASGYTFTSYNMHWVKQAPGQGLEWIGAIYPGMGDTSYNQKFKGKATLTADESTNTAYMELS
SLRSEDTAFYYCARSTYYGGDWYFDVWGQGTTVTVSSASTTTPAPRPPTPAPTIASQPLSLRPEACRPAAGGAVHTRG
LDFACDSGIYIWAPLAGTCGVLLLSLVITLYCKRGRKKLLYIFKQPFMRPVQTTQEEDGCSCRFPEEEEGGCELRVKFSRSA
DAPAYQQGQNQLYNELNLGRREEYDVLDKRRGRDPEMGGKPRRKNPQEGLYNELQKDKMAEAYSEIGMKGERRRG
KGHDGLYQGLSTATKDTYDALHMQALPPRZ

[chemical structure]

(SEQ ID NO: 3024)
ATGGCTCTGCCTGTGACAGCTCTGCTGCTGCCTCTGGCCCTGCTGCTGCATGCTGCCAGACCTGGCTCCGATATTCA
ACTTACACAGTCCCCTAGTTCCTTGTCCGCCTCCGTCGGCGACAGAGTTACCATGACTTGTCGAGCGTCTTCTAGCG
TTTCCTACATTCATTGGTTCCAACAGAAGCCCGGAAAGGCACCAAAACCTTGGATCTACGCCACGTCCAATTTGGCT
AGTGGTGTTCCGGTGCGATTTTCCGGGTCAGGTAGCGGGACGGACTATACTTTTACCATTTCAAGCCTTCAGCCTG
AAGACATCGCGACGTACTATTGTCAGCAGTGGACCTCTAACCCTCCTACCTTTGGCGGTGGAACAAAGCTGGAGAT
CAAACGAGGCGGGGGTGGCTCTGGGGGAGGAGGTTCCGGTGGGGGAGGCTCTCAAGTACAACTGCAACAAAGT
GGGGCTGAAGTGAAGAAGCCCGGTTCTTCAGTCAAAGTATCATGTAAGGCAAGTGGTTATACTTTTACGTCTTATA
ACATGCATTGGGTAAAGCAAGCCCCTGGTCAGGGCCTCGAGTGGATTGGTGCGATCTACCCTGGAATGGGTGATA
CGAGCTATAATCAGAAATTCAAGGGGAAAGCCACCTTGACTGCAGACGAATCTACGAACACGGCTTACATGGAGC
TTAGCTCACTCAGATCAGAGGATACAGCCTTTTACTACTGCGCTAGATCAACTTATTACGGAGGAGACTGGTATTTT
GATGTATGGGGTCAGGGGACCACAGTCACTGTTAGCTCTGCTAGCACCACGACGCCAGCGCCGCGACCACCAACA
CCGGCGCCCACCATCGCGTCGCAGCCCCTGTCCCTGCGCCCAGAGGCGTGCCGGCCAGCGGCGGGGGGCGCAGTG
CACACGAGGGGGCTGGACTTCGCCTGTGATTCCGGAATCTACATCTGGGCGCCCTTGGCCGGGACTTGTGGGGTC
CTTCTCCTGTCACTGGTTATCACCCTTTACTGCAAACGGGGCAGAAAGAAACTCCTGTATATATTCAAACAACCATTT
ATGAGACCAGTACAAACTACTCAAGAGGAAGATGGCTGTAGCTGCCGATTTCCAGAAGAAGAAGAAGGAGGATG
TGAACTGAGAGTGAAGTTCAGCAGGAGCGCAGACGCCCCCGCGTACCAGCAGGGCCAGAACCAGCTCTATAACGA
GCTCAATCTAGGACGAAGAGAGGAGTACGATGTTTTGGACAAGAGACGTGGCCGGGACCCTGAGATGGGGGGA
AAGCCGAGAAGGAAGAACCCTCAGGAAGGCCTGTACAATGAACTGCAGAAAGATAAGATGGCGGAGGCCTACAG
TGAGATTGGGATGAAAGGCGAGCGCCGGAGGGGCAAGGGGCACGATGGCCTTTACCAGGGTCTCAGTACAGCCA

[chemical structure]

[chemical structure]

GGACATTCCCAAAGCGCGGGCAGACGTGTGTGGTGCATTACACCGGGATGCTTGAGGACGGAAAGAAAGTGG
ACTCTTCCCGAGACCGAAATAAACCATTCAAGTTCATGTTGGGCAAGCAGGAGGTTATCAGAGGGTGGGAGGA
GGGCGTCGCTCAGATGAGTGTCGGACAGAGGGCCAAGCTCACGATCTCCCCTGATTACGCCTACGGGGCAACTG
GTCACCCCGGAATCATCCCCCCTCACGCAACCCTCGTGTTCGACGTCGAGCTGCTCAAACTGGAATCAGGCGGAG
GCAGTGGCGGGTTTGGCGATGTCGGTGCCCTTGAAAGCTTGAGAGGAAATGCCGATCTCGCTTACATCTTGAGC
ATGGAGCCCTGTGGGCACTGTCTGATCATCAACAATGTTAACTTTTGCCGGGAGTCCGGCCTGCGCACACGCACA
GGCTCCAACATTGACTGCGAAAAACTTCGAAGGAGGTTTAGCTCTCTGCATTTCATGGTAGAGGTGAAGGGGG
ATCTGACCGCCAAGAAAATGGTTCTCGCCCTTCTCGAGCTTGCGCAGCAGGACCATGGAGCGCTTGACTGTTGTG
TCGTTGTGATACTGAGCCATGGCTGTCAGGCTTCCCATCTCCAGTTTCCAGGGGCCGTGTACGGAACCGATGGAT
GCCCTGTGTCAGTTGAAAAGATCGTAAACATCTTTAACGGAACATCTTGCCCGAGCCTCGGCGGTAAACCGAAG
CTTTTTTTTATCCAGGCCTGCGGCGGTGAACAGAAAGATCATGGCTTCGAGGTTGCCAGTACCAGCCCTGAAGAC
GAATCCCCCGGGTCAAATCCTGAACCAGATGCGACCCCTTTCCAGGAAGGACTCCGCACTTTTGACCAGCTTGAC
GCCATTTCCTCCCTGCCAACACCTTCCGACATATTTGTAAGCTACTCCACCTTTCCAGGATTCGTGAGCTGGCGCG
ACCCAAAATCCGGCAGTTGGTATGTTGAAACCCTGGACGATATCTTCGAACAATGGGCCCACAGTGAGGACCTG
CAGTCCCTTCTTCTGCGCGTAGCCAATGCCGTGTCAGTCAAAGGGATTTACAAGCAGATGCCAGGCTGCTTTAAT
TTCCTGCGCAAGAAACTGTTTTTTAAGACCAGTTGA

[chemical structure]

(SEQ ID NO: 3025)
MALPVTALLLPLALLLHAARPGSDIQLTQSPSSLSASVGDRVTMTCRASSSVSYIHWFQQKPGKAPKPWIYATSNLASGV
PVRFSGSGSGTDYTFTISSLQPEDIATYYCQQWTSNPPTFGGGTKLEIKRGGGGSGGGGSGGGGSQVQLQQSGAEVKK
PGSSVKVSCKASGYTFTSYNMHWVKQAPGQGLEWIGAIYPGMGDTSYNQKFKGKATLTADESTNTAYMELSSLRSED
TAFYYCARSTYYGGDWYFDVWGQGTTVTVSSASTTTPAPRPPTPAPTIASQPLSLRPEACRPAAGGAVHTRGLDFACDS
GIYIWAPLAGTCGVLLLSLVITLYCKRGRKKLLYIFKQPFMRPVQTTQEEDGCSCRFPEEEEGGCELRVKFSRSADAPAYQ
QGQNQLYNELNLGRREEYDVLDKRRGRDPEMGGKPRRKNPQEGLYNELQKDKMAEAYSEIGMKGERRRGKGHDGL

[chemical structure]

DGKKVDSSRDRNKPFKFMLGKQEVIRGWEEGVAQMSVGQRAKLTISPDYAYGATGHPGIIPPHATLVFDVELLKLES
GGGSGGFGDVGALESLRGNADLAYILSMEPCGHCLIINNVNFCRESGLRTRTGSNIDCEKLRRRFSSLHFMVEVKGDL
TAKKMVLALLELAQQDHGALDCCVVVILSHGCQASHLQFPGAVYGTDGCPVSVEKIVNIFNGTSCPSLGGKPKLFFIQ
ACGGEQKDHGFEVASTSPEDESPGSNPEPDATPFQEGLRTFDQLDAISSLPTPSDIFVSYSTFPGFVSWRDPKSGSVVY
VETLDDIFEQWAHSEDLQSLLLRVANAVSVKGIYKQMPGCFNFLRKKLFFKTSZ

[chemical structure]

(SEQ ID NO: 3026)
ATGCTCGAGGGGGTTCAGGTGGAGACTATCAGCCCGGGCGACGGACGGACATTCCCAAAGCGCGGGCAGACGT
GTGTGGTGCATTACACCGGGATGCTTGAGGACGGAAAGAAAGTGGACTCTTCCCGAGACCGAAATAAACCATT
CAAGTTCATGTTGGGCAAGCAGGAGGTTATCAGAGGGTGGGAGGAGGGCGTCGCTCAGATGAGTGTCGGACA
GAGGGCCAAGCTCACGATCTCCCCTGATTACGCCTACGGGGCAACTGGTCACCCCGGAATCATCCCCCCTCACGC
AACCCTCGTGTTCGACGTCGAGCTGCTCAAACTGGAATCAGGCGGAGGCAGTGGCGCTAGCGGGTTTGGCGAT
GTCGGTGCCCTTGAAAGCTTGAGAGGAAATGCCGATCTCGCTTACATCTTGAGCATGGAGCCCTGTGGGCACTG
TCTGATCATCAACAATGTTAACTTTTGCCGGGAGTCCGGCCTGCGCACACGCACAGGCTCCAACATTGACTGCGA
AAAACTTCGAAGGAGGTTTAGCTCTCTGCATTTCATGGTAGAGGTGAAGGGGGATCTGACCGCCAAGAAAATG
GTTCTCGCCCTTCTCGAGCTTGCGCAGCAGGACCATGGAGCGCTTGACTGTTGTGTCGTTGTGATACTGAGCCAT
GGCTGTCAGGCTTCCCATCTCCAGTTTCCAGGGGCCGTGTACGGAACCGATGGATGCCCTGTGTCAGTTGAAAA
GATCGTAAACATCTTTAACGGAACATCTTGCCCGAGCCTCGGCGGTAAACCGAAGCTTTTTTTTATCCAGGCCTG
CGGCGGTGAACAGAAAGATCATGGCTTCGAGGTTGCCAGTACCAGCCCTGAAGACGAATCCCCCGGGTCAAAT
CCTGAACCAGATGCGACCCCTTTCCAGGAAGGACTCCGCACTTTTGACCAGCTTGACGCCATTTCCTCCCTGCCAA
CACCTTCCGACATATTTGTAAGCTACTCCACCTTTCCAGGATTCGTGAGCTGGCGCGACCCAAAATCCGGCAGTT
GGTATGTTGAAACCCTGGACGATATTTTCGAACAATGGGCCCACAGTGAGGACCTGCAGTCCCTTCTTCTGCGCG
TAGCCAATGCCGTGTCAGTCAAAGGGATTTACAAGCAGATGCCAGGCTGCTTTAATTTCCTGCGCAAGAAACTG

[chemical structure]

[chemical structure]

ATATTCAACTTACACAGTCCCCTAGTTCCTTGTCCGCCTCCGTCGGCGACAGAGTTACCATGACTTGTCGAGCGTCTT
CTAGCGTTTCCTACATTCATTGGTTCCAACAGAAGCCCGGAAAGGCACCAAAACCTTGGATCTACGCCACGTCCAAT
TTGGCTAGTGGTGTTCCGGTGCGATTTTCCGGGTCAGGTAGCGGGACGGACTATACTTTTACCATTTCAAGCCTTCA
GCCTGAAGACATCGCGACGTACTATTGTCAGCAGTGGACCTCTAACCCTCCTACCTTTGGCGGTGGAACAAAGCTG
GAGATCAAACGAGGCGGGGGTGGCTCTGGGGGAGGAGGTTCCGGTGGGGGAGGCTCTCAAGTACAACTGCAAC
AAAGTGGGGCTGAAGTGAAGAAGCCCGGTTCTTCAGTCAAAGTATCATGTAAGGCAAGTGGTTATACTTTTACGTC
TTATAACATGCATTGGGTAAAGCAAGCCCCTGGTCAGGGCCTCGAGTGGATTGGTGCGATCTACCCTGGAATGGG
TGATACGAGCTATAATCAGAAATTCAAGGGGAAAGCCACCTTGACTGCAGACGAATCTACGAACACGGCTTACATG
GAGCTTAGCTCACTCAGATCAGAGGATACAGCCTTTTACTACTGCGCTAGATCAACTTATTACGGAGGAGACTGGT
ATTTTGATGTATGGGGTCAGGGGACCACAGTCACTGTTAGCTCTGCTAGCACCACGACGCCAGCGCCGCGACCACC
AACACCGGCGCCCACCATCGCGTCGCAGCCCCTGTCCCTGCGCCCAGAGGCGTGCCGGCCAGCGGCGGGGGGCGC
AGTGCACACGAGGGGGCTGGACTTCGCCTGTGATTCCGGAATCTACATCTGGGCGCCCTTGGCCGGGACTTGTGG
GGTCCTTCTCCTGTCACTGGTTATCACCCTTTACTGCAAACGGGGCAGAAAGAAACTCCTGTATATATTCAAACAAC
CATTTATGAGACCAGTACAAACTACTCAAGAGGAAGATGGCTGTAGCTGCCGATTTCCAGAAGAAGAAGAAGGAG
GATGTGAACTGAGAGTGAAGTTCAGCAGGAGCGCAGACGCCCCCGCGTACCAGCAGGGCCAGAACCAGCTCTATA
ACGAGCTCAATCTAGGACGAAGAGAGGAGTACGATGTTTTGGACAAGAGACGTGGCCGGGACCCTGAGATGGGG
GGAAAGCCGAGAAGGAAGAACCCTCAGGAAGGCCTGTACAATGAACTGCAGAAAGATAAGATGGCGGAGGCCT
ACAGTGAGATTGGGATGAAAGGCGAGCGCCGGAGGGGCAAGGGGCACGATGGCCTTTACCAGGGTCTCAGTACA
GCCACCAAGGACACCTACGACGCCCTTCACATGCAGGCCCTGCCCCCTCGC

[chemical structure]

(SEQ ID NO: 3027)
MLEGVQVETISPGDGRTFPKRGQTCVVHYTGMLEDGKKVDSSRDRNKPFKFMLGKQEVIRGWEEGVAQMSVGQRA
KLTISPDYAYGATGHPGIIPPHATLVFDVELLKLESGGGSGASGFGDVGALESLRGNADLAYILSMEPCGHCLIINNVNFC
RESGLRTRTGSNIDCEKLRRRFSSLHFMVEVKGDLTAKKMVLALLELAQQDHGALDCCVVVILSHGCQASHLQFPGAVY
GTDGCPVSVEKIVNIFNGTSCPSLGGKPKLFFIQACGGEQKDHGFEVASTSPEDESPGSNPEPDATPFQEGLRTFDQLDA
ISSLPTPSDIFVSYSTFPGFVSWRDPKSGSWYVETLDDIFEQWAHSEDLQSLLLRVANAVSVKGIYKQMPGCFNFLRKKLF

[chemical structure]

YIHWFQQKPGKAPKPWIYATSNLASGVPVRFSGSGSGTDYTFTISSLQPEDIATYYCQQWTSNPPTFGGGTKLEIKR
GGGGSGGGGSGGGGSQVQLQQSGAEVKKPGSSVKVSCKASGYTFTSYNMHWVKQAPGQGLEWIGAIYPGMGD
TSYNQKFKGKATLTADESTNTAYMELSSLRSEDTAFYYCARSTYYGGDVVYFDVWGQGTTVTVSSASTTTPAPRPPT
PAPTIASQPLSLRPEACRPAAGGAVHTRGLDFACDSGIYIWAPLAGTCGVLLLSLVITLYCKRGRKKLLYIFKQPFMRPV
QTTQEEDGCSCRFPEEEEGGCELRVKFSRSADAPAYQQGQNQLYNELNLGRREEYDVLDKRRGRDPEMGGKPRRK
NPQEGLYNELQKDKMAEAYSEIGMKGERRRGKGHDGLYQGLSTATKDTYDALHMQALPPRZ

[chemical structure]

(SEQ ID NO: 3028)
ATGGCCTTACCAGTGACCGCCTTGCTCCTGCCGCTGGCCTTGCTGCTCCACGCCGCCAGGCCGGGATCCGACATCCA
GATGACACAGACTACATCCTCCCTGTCTGCCTCTCTGGGAGACAGAGTCACCATCAGTTGCAGGGCAAGTCAGGAC
ATTAGTAAATATTTAAATTGGTATCAGCAGAAACCAGATGGAACTGTTAAACTCCTGATCTACCATACATCAAGATT
ACACTCAGGAGTCCCATCAAGGTTCAGTGGCAGTGGGTCTGGAACAGATTATTCTCTCACCATTAGCAACCTGGAG
CAAGAAGATATTGCCACTTACTTTTGCCAACAGGGTAATACGCTTCCGTACACGTTCGGAGGGGGGACTAAGTTGG
AAATAACAGGTGGCGGTGGCTCGGGCGGTGGTGGGTCGGGTGGCGGCGGATCTGAGGTGAAACTGCAGGAGTC
AGGACCTGGCCTGGTGGCGCCCTCACAGAGCCTGTCCGTCACATGCACTGTCTCAGGGGTCTCATTACCCGACTAT
GGTGTAAGCTGGATTCGCCAGCCTCCACGAAAGGGTCTGGAGTGGCTGGGAGTAATATGGGGTAGTGAAACCAC
ATACTATAATTCAGCTCTCAAATCCAGACTGACCATCATCAAGGACAACTCCAAGAGCCAAGTTTTCTTAAAAATGA
ACAGTCTGCAAACTGATGACACAGCCATTTACTACTGTGCCAAACATTATTACTACGGTGGTAGCTATGCTATGGAC
TACTGGGGTCAAGGAACCTCAGTCACCGTCTCCTCAGCTAGCACCACGACGCCAGCGCCGCGACCACCAACACCGG
CGCCCACCATCGCGTCGCAGCCCCTGTCCCTGCGCCCAGAGGCGTGCCGGCCAGCGGCGGGGGGCGCAGTGCACA
CGAGGGGGCTGGACTTCGCCTGTGATTCCGGAATCTACATCTGGGCCCCTCTGGCCGGCACCTGTGGCGTGCTGCT
GCTGTCTCTCGTGATCACCCTGTACTGCAAGCGGGGCAGAAAGAAGCTGCTGTACATCTTCAAGCAGCCCTTCATG
CGGCCCGTGCAGACCACCCAGGAAGAGGACGGCTGCTCCTGCAGATTCCCCGAGGAAGAAGAAGGCGGCTGCGA
GCTGAGAGTGAAGTTCAGCAGAAGCGCCGACGCCCCTGCCTATCAGCAGGGCCAGAACCAGCTGTACAACGAGCT
GAACCTGGGCAGACGGGAAGAGTACGACGTGCTGGACAAGCGGAGAGGCAGGGACCCTGAGATGGGCGGCAAG
CCCAGAAGAAAGAACCCCCAGGAAGGCCTGTATAACGAACTGCAGAAAGACAAGATGGCCGAGGCCTACAGCGA
GATCGGAATGAAGGGCGAGCGGAGAAGAGGCAAGGGCCACGATGGCCTGTACCAGGGCCTGAGCACCGCCACC

[chemical structure]

[chemical structure]

GCAGAACCTTCCCTAAGAGGGGCCAGACCTGCGTGGTGCACTACACCGGCATGCTGGAAGATGGCAAGAAGAT
GGACAGCTCCCGGGACCGGAACAAGCCCTTCAAGTTCATGCTGGGCAAGCAGGAAGTGATCCGGGGCTGGGAA
GAGGGCGTGGCACAGATGTCTGTGGGCCAGAGAGCCAAGCTGACCATCAGCCCCGATTACGCCTACGGCGCCA
CAGGCCACCCTGGCATCATTCCTCCACACGCCACACTGGTGTTCGATGTGGAACTGCTGAAGCTGGAAACCCGG
GGAGTGCAGGTGGAAACAATCAGCCCTGGCGACGGCCGGACCTTTCCAAAACGGGGACAGACATGTGTGGTGC
ATTATACAGGGATGCTGGAAGATGGGAAAAAAATGGATAGCAGCCGCGACCGCAACAAACCTTTTAAGTTTAT
GCTGGGGAAACAGGAAGTGATTAGAGGCTGGGAAGAGGGGGTGGCACAGATGAGCGTGGGACAGCGGGCCA
AACTGACAATCTCCCCCGACTATGCCTATGGGGCCACCGGACACCCCGGAATCATCCCACCTCATGCTACCCTGG
TGTTTGACGTGGAACTGCTGAAACTGGAAACAAGCGGCGGAGGCAGCGGCGGCTTTGGAGATGTGGGAGCCCT
GGAAAGCCTGCGGGGCAATGCCGATCTGGCCTACATCCTGAGCATGGAACCCTGCGGCCACTGCCTGATTATCA
ACAACGTGAACTTCTGCAGAGAGAGCGGCCTGCGGACCAGAACCGGCAGCAACATCGACTGCGAGAAGCTGCG
GCGGAGATTCAGCAGCCTGCACTTCATGGTGGAAGTGAAGGGGGACCTGACCGCCAAGAAAATGGTGCTGGCT
CTGCTGGAACTGGCCCAGCAGGATCATGGCGCCCTGGACTGTTGCGTGGTCGTGATCCTGAGCCACGGCTGCCA
GGCCAGCCATCTGCAGTTTCCCGGCGCTGTGTATGGCACCGATGGCTGCCCTGTGTCCGTGGAAAAGATCGTGA
ATATCTTCAACGGCACCAGCTGCCCCAGCCTGGGCGGAAAGCCTAAGCTGTTCTTTATTCAAGCCTGTGGGGGCG
AGCAGAAGGACCACGGATTTGAGGTGGCCAGCACCTCCCCCGAGGATGAGAGCCCTGGCAGCAACCCTGAGCC
TGACGCCACCCCATTCCAGGAAGGACTGCGGACCTTCGACCAGCTGGACGCCATCTCTAGCCTGCCCACCCCCAG
CGACATCTTCGTGTCCTACAGCACCTTCCCTGGCTTTGTGTCCTGGCGGGACCCCAAGTCCGGCTCTTGGTACGTG
GAAACCCTGGACGACATCTTTGAGCAGTGGGCCCATAGCGAGGACCTGCAGAGCCTGCTGCTGAGGGTGGCCA
ATGCCGTGTCCGTGAAGGGCATCTACAAGCAGATGCCCGGCTGCTTCAACTTCCTGCGGAAGAAGCTGTTTTTCA
AGACCAGC

[chemical structure]

(SEQ ID NO: 3029)
MALPVTALLLPLALLLHAARPGSDIQMTQTTSSLSASLGDRVTISCRASQDISKYLNWYQQKPDGTVKLLIYHTSRLHSGV
PSRFSGSGSGTDYSLTISNLEQEDIATYFCQQGNTLPYTFGGGTKLEITGGGGSGGGGSGGGGSEVKLQESGPGLVAPSQ
SLSVTCTVSGVSLPDYGVSWIRQPPRKGLEWLGVIWGSETTYYNSALKSRLTIIKDNSKSQVFLKMNSLQTDDTAIYYCAK
HYYYGGSYAMDYWGQGTSVTVSSASTTTPAPRPPTPAPTIASQPLSLRPEACRPAAGGAVHTRGLDFACDSGIYIWAPL
AGTCGVLLLSLVITLYCKRGRKKLLYIFKQPFMRPVQTTQEEDGCSCRFPEEEEGGCELRVKFSRSADAPAYQQGQNQLY
NELNLGRREEYDVLDKRRGRDPEMGGKPRRKNPQEGLYNELQKDKMAEAYSEIGMKGERRRGKGHDGLYQGLSTAT

[chemical structure]

SSRDRNKPFKFMLGKQEVIRGWEEGVAQMSVGQRAKLTISPDYAYGATGHPGIIPPHATLVFDVELLKLETRGVQVE
TISPGDGRTFPKRGQTCVVHYTGMLEDGKKMDSSRDRNKPFKFMLGKQEVIRGWEEGVAQMSVGQRAKLTISPD
YAYGATGHPGIIPPHATLVFDVELLKLETSGGGSGGFGDVGALESLRGNADLAYILSMEPCGHCLIINNVNFCRESGLR
TRTGSNIDCEKLRRRFSSLHFMVEVKGDLTAKKMVLALLELAQQDHGALDCCVVVILSHGCQASHLQFPGAVYGTD
GCPVSVEKIVNIFNGTSCPSLGGKPKLFFIQACGGEQKDHGFEVASTSPEDESPGSNPEPDATPFQEGLRTFDQLDAIS
SLPTPSDIFVSYSTFPGFVSWRDPKSGSWYVETLDDIFEQWAHSEDLQSLLLRVANAVSVKGIYKQMPGCFNFLRKKL
FFKTS
CD19bbz on-CAR nucleotide sequence, CD19 on-CAR (SEQ ID NO: 977, also provided previously herein)
Signal peptide-conditional aggregation domains (4 repeats)-Furin site-FMC63bbz
ATGGCCTTACCAGTGACCGCCTTGCTCCTGCCGCTGGCCTTGCTGCTCCACGCCGCCAGGCCGGGATCCCGGGGC
GTGCAGGTTGAGACAATTTCCCCAGGAGATGGGCGAACGTTCCCCAAGCGCGGACAGACATGCGTTGTGCACT
ACACAGGAATGTTGGAGGACGGAAAGAAAATGGACAGTTCAAGAGATCGGAACAAACCATTCAAATTCATGTT
GGGAAAACAGGAAGTGATACGGGGCTGGGAAGAGGGTGTAGCGCAAATGTCCGTTGGTCAACGAGCAAAACT
CACGATAAGTCCCGATTATGCTTACGGCGCAACCGGTCACCCGGGCATCATACCGCCTCATGCGACTTTGGTCTT
TGATGTGGAGCTGTTGAAACTTGAAACTCGCGGAGTACAGGTTGAAACAATATCACCCGGGGACGGGCGGACT
TTTCCGAAGAGAGGTCAGACCTGCGTCGTCCATTATACCGGTATGCTGGAGGACGGAAAGAAAATGGACAGCT
CACGGGACCGAAATAAACCATTCAAATTTATGTTGGGGAAACAAGAGGTTATCAGGGGCTGGGAGGAGGGTG
TGGCCCAGATGTCTGTCGGTCAGCGCGCGAAACTCACAATCTCTCCGGATTATGCGTATGGGGCGACAGGGCAT
CCGGGAATTATCCCTCCCCACGCTACCTTGGTTTTCGATGTTGAGCTTCTGAAGTTGGAGACCAGAGGAGTTCAA
GTGGAGACAATATCTCCTGGGGATGGACGGACGTTCCCCAAGCGCGGCCAGACCTGTGTAGTCCACTACACAGG
GATGCTTGAAGACGGAAAAAAGATGGATAGCAGTAGAGATCGCAACAAACCATTTAAGTTCATGCTGGGGAA
GCAGGAAGTAATACGCGGCTGGGAGGAAGGCGTGGCACAGATGAGTGTTGGTCAACGGGCCAAACTTACTATT
TCTCCCGATTATGCGTATGGAGCCACCGGGCACCCTGGCATTATCCCACCCCATGCCACATTGGTTTTTGACGTTG
AATTGCTTAAATTGGAGACCAGGGGAGTCCAAGTGGAAACAATATCACCGGGGGATGGTCGGACTTTTCCTAA
AAGGGGCCAAACCTGTGTAGTCCATTATACCGGAATGCTCGAAGACGGAAAGAAAATGGACTCTTCTAGAGAC
CGCAATAAGCCCTTCAAGTTCATGTTGGGTAAGCAAGAGGTGATCCGGGGCTGGGAAGAGGGGGTCGCTCAAA
TGTCCGTCGGTCAGCGAGCTAAACTGACTATTTCCCCAGACTACGCATATGGAGCGACTGGCCACCCCGGTATTA
TTCCTCCCCATGCGACTCTCGTGTTCGACGTAGAACTCTTGAAATTGGAAACGTCAGCCCGGAACAGGCGGAAGA
GAGGATCCGACATCCAGATGACACAGACTACATCCTCCCTGTCTGCCTCTCTGGGAGACAGAGTCACCATCAGTTG
CAGGGCAAGTCAGGACATTAGTAAATATTTAAATTGGTATCAGCAGAAACCAGATGGAACTGTTAAACTCCTGATC
TACCATACATCAAGATTACACTCAGGAGTCCCATCAAGGTTCAGTGGCAGTGGGTCTGGAACAGATTATTCTCTCAC
CATTAGCAACCTGGAGCAAGAAGATATTGCCACTTACTTTTGCCAACAGGGTAATACGCTTCCGTACACGTTCGGA
GGGGGGACTAAGTTGGAAATAACAGGTGGCGGTGGCTCGGGCGGTGGTGGGTCGGGTGGCGGCGGATCTGAGG
TGAAACTGCAGGAGTCAGGACCTGGCCTGGTGGCGCCCTCACAGAGCCTGTCCGTCACATGCACTGTCTCAGGGG
TCTCATTACCCGACTATGGTGTAAGCTGGATTCGCCAGCCTCCACGAAAGGGTCTGGAGTGGCTGGGAGTAATATG
GGGTAGTGAAACCACATACTATAATTCAGCTCTCAAATCCAGACTGACCATCATCAAGGACAACTCCAAGAGCCAA
GTTTTCTTAAAAATGAACAGTCTGCAAACTGATGACACAGCCATTTACTACTGTGCCAAACATTATTACTACGGTGG
TAGCTATGCTATGGACTACTGGGGTCAAGGAACCTCAGTCACCGTCTCCTCAGCTAGCACCACGACGCCAGCGCCG
CGACCACCAACACCGGCGCCCACCATCGCGTCGCAGCCCCTGTCCCTGCGCCCAGAGGCGTGCCGGCCAGCGGCG
GGGGGCGCAGTGCACACGAGGGGGCTGGACTTCGCCTGTGATTCCGGAATCTACATCTGGGCGCCCTTGGCCGGG
ACTTGTGGGGTCCTTCTCCTGTCACTGGTTATCACCCTTTACTGCAAACGGGGCAGAAAGAAACTCCTGTATATATT
CAAACAACCATTTATGAGACCAGTACAAACTACTCAAGAGGAAGATGGCTGTAGCTGCCGATTTCCAGAAGAAGA
AGAAGGAGGATGTGAACTGAGAGTGAAGTTCAGCAGGAGCGCAGACGCCCCCGCGTACCAGCAGGGCCAGAACC
AGCTCTATAACGAGCTCAATCTAGGACGAAGAGAGGAGTACGATGTTTTGGACAAGAGACGTGGCCGGGACCCTG
AGATGGGGGGAAAGCCGAGAAGGAAGAACCCTCAGGAAGGCCTGTACAATGAACTGCAGAAAGATAAGATGGC
GGAGGCCTACAGTGAGATTGGGATGAAAGGCGAGCGCCGGAGGGGCAAGGGGCACGATGGCCTTTACCAGGGT
CTCAGTACAGCCACCAAGGACACCTACGACGCCCTTCACATGCAGGCCCTGCCCCCTCGCTAA
CD19bbz on-CAR amino acid sequence (SEQ ID NO: 978, also provided previously herein)
Signal peptide-conditional aggregation domains (4 repeats)-Furin site-FMC63bbz
MALPVTALLLPLALLLHAARPGSRGVQVETISPGDGRTFPKRGQTCVVHYTGMLEDGKKMDSSRDRNKPFKFMLGK
QEVIRGWEEGVAQMSVGQRAKLTISPDYAYGATGHPGIIPPHATLVFDVELLKLETRGVQVETISPGDGRTFPKRGQ
TCVVHYTGMLEDGKKMDSSRDRNKPFKFMLGKQEVIRGWEEGVAQMSVGQRAKLTISPDYAYGATGHPGIIPPH
ATLVFDVELLKLETRGVQVETISPGDGRTFPKRGQTCVVHYTGMLEDGKKMDSSRDRNKPFKFMLGKQEVIRGWEE
GVAQMSVGQRAKLTISPDYAYGATGHPGIIPPHATLVFDVELLKLETRGVQVETISPGDGRTFPKRGQTCVVHYTGM
LEDGKKMDSSRDRNKPFKFMLGKQEVIRGWEEGVAQMSVGQRAKLTISPDYAYGATGHPGIIPPHATLVFDVELLK
LETSARNRRKRGSDIQMTQTTSSLSASLGDRVTISCRASQDISKYLNWYQQKPDGTVKLLIYHTSRLHSGVPSRFSGSGSG
TDYSLTISNLEQEDIATYFCQQGNTLPYTFGGGTKLEITGGGGSGGGGSGGGGSEVKLQESGPGLVAPSQSLSVTCTVSG
VSLPDYGVSWIRQPPRKGLEWLGVIWGSETTYYNSALKSRLTIIKDNSKSQVFLKMNSLQTDDTAIYYCAKHYYYGGSYA
MDYWGQGTSVTVSSASTTTPAPRPPTPAPTIASQPLSLRPEACRPAAGGAVHTRGLDFACDSGIYIWAPLAGTCGVLLL
SLVITLYCKRGRKKLLYIFKQPFMRPVQTTQEEDGCSCRFPEEEEGGCELRVKFSRSADAPAYQQGQNQLYNELNLGRRE
EYDVLDKRRGRDPEMGGKPRRKNPQEGLYNELQKDKMAEAYSEIGMKGERRRGKGHDGLYQGLSTATKDTYDALHM
QALPPRZ

[chemical structure]

acid sequence nucleotide sequence
(SEQ ID NO: 3030)

[chemical structure]

[chemical structure]

[chemical structure]

[chemical structure]

[chemical structure]

[chemical structure]

[chemical structure]

[chemical structure]

[chemical structure]

[chemical structure]

[chemical structure]

ACCGGCGCCCACCATCGCGTCGCAGCCCCTGTCCCTGCGCCCAGAGGCGTGCCGGCCAGCGGCGGGGGGCGCA
GTGCACACGAGGGGGCTGGACTTCGCCTGTGATTCCGGAATCTACATCTGGGCGCCCTTGGCCGGGACTTGTGG
GGTCCTTCTCCTGTCACTGGTTATCACCCTTTACTGCAAACGGGGCAGAAAGAAACTCCTGTATATATTCAAACAAC
CATTTATGAGACCAGTACAAACTACTCAAGAGGAAGATGGCTGTAGCTGCCGATTTCCAGAAGAAGAAGAAGGA
GGATGTGAACTGAGAGTGAAGTTCAGCAGGAGCGCAGACGCCCCCGCGTACCAGCAGGGCCAGAACCAGCTCTA
TAACGAGCTCAATCTAGGACGAAGAGAGGAGTACGATGTTTTGGACAAGAGACGTGGCCGGGACCCTGAGATGG
GGGGAAAGCCGAGAAGGAAGAACCCTCAGGAAGGCCTGTACAATGAACTGCAGAAAGATAAGATGGCGGAGGC
CTACAGTGAGATTGGGATGAAAGGCGAGCGCCGGAGGGGCAAGGGGCACGATGGCCTTTACCAGGGTCTCAGT
ACAGCCACCAAGGACACCTACGACGCCCTTCACATGCAGGCCCTGCCCCCTCGCGGAAGCGGCGCCACCAATTTCA

[chemical structure]

[chemical structure]

[chemical structure]

[chemical structure]

[chemical structure]

[chemical structure]

[chemical structure]

[chemical structure]

[chemical structure]

[chemical structure]

[chemical structure]

[chemical structure]

[chemical structure]

[chemical structure]

[chemical structure]

[chemical structure]

[chemical structure]

[chemical structure]

[chemical structure]

[chemical structure]

[chemical structure]

[chemical structure]

[chemical structure]

acid sequence
(SEQ ID NO: 3031)

[chemical structure]

[chemical structure]

[chemical structure]

[chemical structure]

CDSGIYIWAPLAGTCGVLLLSLVITLYCKRGRKKLLYIFKQPFMRPVQTTQEEDGCSCRFPEEEEGGCELRVKFSRSADAP
AYQQGQNQLYNELNLGRREEYDVLDKRRGRDPEMGGKPRRKNPQEGLYNELQKDKMAEAYSEIGMKGERRRGKGH

[chemical structure]

[chemical structure]

[chemical structure]

[chemical structure]

[chemical structure]

[chemical structure]

[chemical structure]

[chemical structure]

CD20bbz on-CAR nucleotide sequence, CD20 on-CAR

[chemical structure]

(SEQ ID NO: 3032)
ATGGCCTTACCAGTGACCGCCTTGCTCCTGCCGCTGGCCTTGCTGCTCCACGCCGCCAGGCCGGGATCCCGGGGCG
TGCAGGTTGAGACAATTTCCCCAGGAGATGGGCGAACGTTCCCCAAGCGCGGACAGACATGCGTTGTGCACTAC
ACAGGAATGTTGGAGGACGGAAAGAAAATGGACAGTTCAAGAGATCGGAACAAACCATTCAAATTCATGTTGG
GAAAACAGGAAGTGATACGGGGCTGGGAAGAGGGTGTAGCGCAAATGTCCGTTGGTCAACGAGCAAAACTCA
CGATAAGTCCCGATTATGCTTACGGCGCAACCGGTCACCCGGGCATCATACCGCCTCATGCGACTTTGGTCTTTG
ATGTGGAGCTGTTGAAACTTGAAACTCGCGGAGTACAGGTTGAAACAATATCACCCGGGGACGGGCGGACTTT
TCCGAAGAGAGGTCAGACCTGCGTCGTCCATTATACCGGTATGCTGGAGGACGGAAAGAAAATGGACAGCTCA
CGGGACCGAAATAAACCATTCAAATTTATGTTGGGGAAACAAGAGGTTATCAGGGGCTGGGAGGAGGGTGTG
GCCCAGATGTCTGTCGGTCAGCGCGCGAAACTCACAATCTCTCCGGATTATGCGTATGGGGCGACAGGGCATCC
GGGAATTATCCCTCCCCACGCTACCTTGGTTTTCGATGTTGAGCTTCTGAAGTTGGAGACCAGAGGAGTTCAAGT
GGAGACAATATCTCCTGGGGATGGACGGACGTTCCCCAAGCGCGGCCAGACCTGTGTAGTCCACTACACAGGG
ATGCTTGAAGACGGAAAAAAGATGGATAGCAGTAGAGATCGCAACAAACCATTTAAGTTCATGCTGGGGAAGC
AGGAAGTAATACGCGGCTGGGAGGAAGGCGTGGCACAGATGAGTGTTGGTCAACGGGCCAAACTTACTATTTC
TCCCGATTATGCGTATGGAGCCACCGGGCACCCTGGCATTATCCCACCCCATGCCACATTGGTTTTTGACGTTGAA
TTGCTTAAATTGGAGACCAGGGGAGTCCAAGTGGAAACAATATCACCGGGGGATGGTCGGACTTTTCCTAAAA
GGGGCCAAACCTGTGTAGTCCATTATACCGGAATGCTCGAAGACGGAAAGAAAATGGACTCTTCTAGAGACCG
CAATAAGCCCTTCAAGTTCATGTTGGGTAAGCAAGAGGTGATCCGGGGCTGGGAAGAGGGGGTCGCTCAAATG
TCCGTCGGTCAGCGAGCTAAACTGACTATTTCCCCAGACTACGCATATGGAGCGACTGGCCACCCCGGTATTATT
CCTCCCCATGCGACTCTCGTGTTCGACGTAGAACTCTTGAAATTGGAAACGTCAGCCCGGAACAGGCGGAAGAG

[chemical structure]

[chemical structure]

[chemical structure]

[chemical structure]

[chemical structure]

[chemical structure]

[chemical structure]

[chemical structure]

[chemical structure]

[chemical structure]

[chemical structure]

[chemical structure]

[chemical structure]

[chemical structure]

[chemical structure]

[chemical structure]

[chemical structure]

[chemical structure]

[chemical structure]

CD20bbz on-CAR amino acid sequence

[chemical structure]

(SEQ ID NO: 3033)
MALPVTALLLPLALLLHAARPGSRGVQVETISPGDGRTFPKRGQTCVVHYTGMLEDGKKMDSSRDRNKPFKFMLGK
QEVIRGWEEGVAQMSVGQRAKLTISPDYAYGATGHPGIIPPHATLVFDVELLKLETRGVQVETISPGDGRTFPKRGQ
TCVVHYTGMLEDGKKMDSSRDRNKPFKFMLGKQEVIRGWEEGVAQMSVGQRAKLTISPDYAYGATGHPGIIPPH
ATLVFDVELLKLETRGVQVETISPGDGRTFPKRGQTCVVHYTGMLEDGKKMDSSRDRNKPFKFMLGKQEVIRGWEE
GVAQMSVGQRAKLTISPDYAYGATGHPGIIPPHATLVFDVELLKLETRGVQVETISPGDGRTFPKRGQTCVVHYTGM
LEDGKKMDSSRDRNKPFKFMLGKQEVIRGWEEGVAQMSVGQRAKLTISPDYAYGATGHPGIIPPHATLVFDVELLK

[chemical structure]

[chemical structure]

[chemical structure]

[chemical structure]

[chemical structure]

[chemical structure]

[chemical structure]

### Other Embodiments

[1055] The disclosures of each and every patent, patent application, and publication cited herein are hereby incorporated herein by reference in their entirety. While this invention has been disclosed with reference to specific embodiments, it is apparent that other embodiments and variations of this invention may be devised by others skilled in the art without departing from the true spirit and scope of the invention. The appended claims are intended to be construed to include all such embodiments and equivalent variations.

1.-5. (canceled)

6. A fusion protein, comprising two protein domains separated by a heterologous protease cleavage site, wherein a first of said protein domains is a degradation domain, and a second of said protein domains is a protein of interest, wherein:
(i) the second of said protein domains is a transmembrane protein; and/or
(ii) the second of said protein domains is a chimeric antigen receptor (CAR).

7.-8. (canceled)

9. The fusion protein of claim 6, wherein the degradation domain is chosen from an estrogen receptor (ER) domain, an FKB protein (FKBP) domain or a dihydrofolate reductase (DHFR).

10. (canceled)

11. The fusion protein of claim 6, wherein:
(i) the degradation domain is from an estrogen receptor (ER) and comprises an amino acid sequence that is at least 90, 95, 97, 98, 99, or 100% identical to either of SEQ ID NOs: 58 or 121;
(ii) the degradation domain is from an FKB protein (FKBP) and comprises an amino acid sequence that is at least 90, 95, 97, 98, 99, or 100% identical to SEQ ID NO: 56; or
(iii) the degradation domain is from a dihydrofolate reductase (DHFR) and comprises an amino acid sequence that is at least 90, 95, 97, 98, 99, or 100% identical to SEQ ID NO: 57.

12.-15. (canceled)

16. The fusion protein of claim 6, wherein the degradation domain has a first state associated with a first level of surface expression and/or extracellular expression of the fusion protein and a second state associated with a second level of surface expression and/or extracellular expression of the fusion protein, wherein the second level is increased, by at least 2, 3, 4, 5, 10, 20 or 30 fold over the first level in the presence of a stabilization compound, wherein:
(i) the stabilization compound is selected from Bazedoxifene or 4-hydroxy tamoxifen (4-OHT) when the fusion protein comprises a degradation domain derived from estrogen receptor; or
(ii) the stabilization compound is Shield-1 when the fusion protein comprises a degradation domain derived from an FKB protein.

17.-18. (canceled)

19. A fusion protein, comprising two protein domains separated by a heterologous protease cleavage site, wherein a first of said protein domains is an aggregation domain, and a second of said protein domains is a transmembrane protein, wherein:
(i) the aggregation domain has a first state associated with a first level of surface expression and/or extracellular expression of the fusion protein and a second state associated with a second level of surface expression and/or extracellular expression of the fusion protein, and wherein the second level is increased by at least 2, 3, 4, 5, 10, 20 or 30 fold over the first level in the presence of a deaggregation compound;
(ii) the heterologous protease cleavage site is a furin cleavage site, provided that the furin cleavage site does not comprise the amino acid sequence SARNRQKR (SEQ ID NO: 981); or
(iii) the second of said protein domains is a chimeric antigen receptor (CAR).

20.-21. (canceled)

22. The fusion protein of claim 19, wherein:
(i) the aggregation domain comprises 1, 2, 3, 4, 5, 6, 7, 8, or more repeats of a dimerization domain, wherein the dimerization domain is a homodimerization or a heterodimerization domain;
(ii) the aggregation domain is from an FKB protein (FKBP);
(iii) the aggregation domain is an FKBP F36M domain;
(iv) the aggregation domain is from an FKB protein (FKBP) and comprises an amino acid sequence that is at least 90, 95, 97, 98, 99, or 100% identical to either of SEQ ID NOs: 975 or 976;
(v) the fusion protein comprises a further 2nd, 3rd, 4th, 5th, 6th, 7th, 8th, 9th, or 10th aggregation domain;
(vi) the aggregation domain forms homodimers with the same aggregation domain;
(vii) the fusion protein comprises a plurality of aggregation domains, wherein the plurality comprises more than one, e.g., two, types of aggregation domains, and a first type of aggregation domain forms heterodimers with a second type of aggregation domain;
(viii) the fusion protein comprises 2, 4, 6, 8, or 10 aggregation domains, and wherein the fusion protein comprises equal numbers of the first type of aggregation domain and the second type of aggregation domain;
(ix) the aggregation domains are disposed in the fusion protein in an alternating order of first type and second type, e.g., first, second, first, second, or second, first, second, first; or
(x) the deaggregation compound is selected from FK506, rapamycin, AP22542, AP21998, and Shield-1 when the fusion protein comprises an aggregation domain derived from FKB protein (FKBP), e.g., FKBP F36M.

23.-32. (canceled)

33. The fusion protein of claim 6, wherein:
(i) said heterologous cleavage site is cleaved by a mammalian intracellular protease;
(ii) said heterologous cleavage site is cleaved by a protease selected from the group consisting of furin, PCSK1, PCSK5, PCSK6, PCSK7, cathepsin B, Granzyme B, Factor XA, Enterokinase, genenase, sortase, precission protease, thrombin, TEV protease, and elastase 1;
(iii) said heterologous cleavage site comprises a polypeptide having an cleavage motif selected from the group consisting of RX(K/R)R consensus motif, RXXX[KR]R consensus motif, RRX consensus motif, I-E-P-D-X consensus motif (SEQ ID NO: 35), Glu/Asp-Gly-Arg, Asp-Asp-Asp-Asp-Lys (SEQ ID NO: 36), Pro-Gly-Ala-Ala-His-Tyr (SEQ ID NO: 37), LPXTG/A consensus motif, Leu-Glu-Val-Phe-Gln-Gly-Pro (SEQ ID NO: 38), Leu-Val-Pro-Arg-Gly-Ser (SEQ ID NO: 40), E N L Y F Q G (SEQ ID NO: 41), and [AGSV]-x (SEQ ID NO: 42);
(iv) said heterologous cleavage site is cleaved by furin; or
(v) said heterologous protease cleavage site is cleaved by a mammalian extracellular protease.

34.-36. (canceled)

37. The fusion protein of claim 33, wherein the fusion protein comprises a furin cleavage site selected from the group consisting of: RTKR (SEQ ID NO: 123); GTGAEDPRPSRKRRSLGDVG (SEQ ID NO: 125); GTGAEDPRPSRKRR (SEQ ID NO: 127); LQWLEQQVAKRRTKR (SEQ ID NO: 129); GTGAEDPRPSRKRRSLGG (SEQ ID NO: 131); GTGAEDPRPSRKRRSLG (SEQ ID NO: 133); SLNLTESHNSRKKR (SEQ ID NO: 135); and CKINGYPKRGRKRR (SEQ ID NO: 137).

38.-39. (canceled)

40. The fusion protein of claim 33, wherein:
(i) said mammalian extracellular protease is selected from the group consisting of Factor XA, Enterokinase, genenase, sortase, precission protease, thrombin, TEV protease, and elastase 1; and/or
(ii) said heterologous cleavage site comprises a polypeptide having an amino acid sequence selected from the group consisting of Glu/Asp-Gly-Arg, Asp-Asp-Asp-Asp-Lys (SEQ ID NO: 36), Pro-Gly-Ala-Ala-His-Tyr (SEQ ID NO: 37), LPXTG/A consensus motif, Leu-Glu-Val-Phe-Gln-Gly-Pro (SEQ ID NO: 38), Leu-Val-Pro-Arg-Gly-Ser (SEQ ID NO: 40), E-N-L-Y-F-Q-G (SEQ ID NO: 41), and [AGSV]-x (SEQ ID NO: 42).

41.-42. (canceled)

43. The fusion protein of claim 6, wherein said chimeric antigen receptor (CAR) comprises an antigen binding domain, a transmembrane domain, and one or more intracellular signaling domains, wherein:
(i) said intracellular signaling domain comprises one or more primary signaling domain; and/or
(ii) said intracellular signaling domain comprises one or more costimulatory signaling domains.

44.-45. (canceled)

46. The fusion protein of claim 43, wherein:
(i) one of said one or more primary signaling domains comprises a CD3-zeta stimulatory domain;
(ii) one or more of said costimulatory signaling domains is an intracellular domain from a costimulatory protein selected from the group consisting of CD27, CD28, 4-1BB (CD137), OX40, GITR, CD30, CD40, ICOS, BAFFR, HVEM, ICAM-1, lymphocyte function-associated antigen-1 (LFA-1), CD2, CDS, CD7, CD287, LIGHT, NKG2C, NKG2D, SLAMF7, NKp80, NKp30, NKp44, NKp46, CD160, B7-H3, and a ligand that specifically binds with CD83;
(iii) said one or more of said costimulatory signaling domains comprises the 4-1BB costimulatory domain; or
(iv) said one or more of said costimulatory domains comprises the CD28 costimulatory domain.

47.-49. (canceled)

50. The fusion protein of claim 43, wherein:
(i) said antigen binding domain is an scFv:
(ii) said antigen binding domain binds an antigen selected from the group consisting of CD19; CD123; CD22; CD30; CD171; CS-1; C-type lectin-like molecule-1, CD33; epidermal growth factor receptor variant III (EGFRvIII); ganglioside G2 (GD2); ganglioside GD3; TNF receptor family member B cell maturation (BCMA); Tn antigen ((Tn Ag) or (GalNAcα-Ser/Thr)); prostate-specific membrane antigen (PSMA); Receptor tyrosine kinase-like orphan receptor 1 (ROR1); Fms-Like Tyrosine Kinase 3 (FLT3); Tumor-associated glycoprotein 72 (TAG72); CD38; CD44v6; Carcinoembryonic antigen (CEA); Epithelial cell adhesion molecule (EPCAM); B7H3 (CD276); KIT (CD117); Interleukin-13 receptor subunit alpha-2; Mesothelin; Interleukin 11 receptor alpha (IL-11Ra); prostate stem cell antigen (PSCA); Protease Serine 21; vascular endothelial growth factor receptor 2 (VEGFR2); Lewis(Y) antigen; CD24; Platelet-derived growth factor receptor beta (PDGFR-beta); Stage-specific embryonic antigen-4 (SSEA-4); CD20; Folate receptor alpha; Receptor tyrosine-protein kinase ERBB2 (Her2/neu); Mucin 1, cell surface associated (MUC1); epidermal growth factor receptor (EGFR); neural cell adhesion molecule (NCAM); Prostase; prostatic acid phosphatase (PAP); elongation factor 2 mutated (ELF2M); Ephrin B2; fibroblast activation protein alpha (FAP); insulin-like growth factor 1 receptor (IGF-I receptor), carbonic anhydrase IX (CAIX); Proteasome (Prosome, Macropain) Subunit, Beta Type, 9 (LMP2); glycoprotein 100 (gp100); oncogene fusion protein consisting of breakpoint cluster region (BCR) and Abelson murine leukemia viral oncogene homolog 1 (Abl) (bcr-abl); tyrosinase; ephrin type-A receptor 2 (EphA2); Fucosyl GM1; sialyl Lewis adhesion molecule (sLe); ganglioside GM3; transglutaminase 5 (TGS5); high molecular weight-melanoma-associated antigen (HMWMAA); o-acetyl-GD2 ganglioside (OAcGD2); Folate receptor beta; tumor endothelial marker 1 (TEM1/CD248); tumor endothelial marker 7-related (TEM7R); claudin 6 (CLDN6); thyroid stimulating hormone receptor (TSHR); G protein-coupled receptor class C group 5, member D (GPRC5D); chromosome X open reading frame 61 (CXORF61); CD97; CD179a; anaplastic lymphoma kinase (ALK); Polysialic acid; placenta-specific 1 (PLAC1); hexasaccharide portion of globoH glycoceramide (GloboH); mammary gland differentiation antigen (NY-BR-1); uroplakin 2 (UPK2); Hepatitis A virus cellular receptor 1 (HAVCR1); adrenoceptor beta 3 (ADRB3); pannexin 3 (PANX3); G protein-coupled receptor 20 (GPR20); lymphocyte antigen 6 complex, locus K 9 (LY6K); Olfactory receptor 51E2 (OR51E2); TCR Gamma Alternate Reading Frame Protein (TARP); Wilms tumor protein (WT1); Cancer/testis antigen 1 (NY-ESO-1); Cancer/testis antigen 2 (LAGE-1a); Melanoma-associated antigen 1 (MAGE-A1); ETS translocation-variant gene 6, located on chromosome 12p (ETV6-AML); sperm protein 17 (SPA17); X Antigen Family, Member 1A (XAGE1); angiopoietin-binding cell surface receptor 2 (Tie 2); melanoma cancer testis antigen-1 (MAD-CT-1); melanoma cancer testis antigen-2 (MAD-CT-2); Fos-related antigen 1; tumor protein p53 (p53); p53 mutant; prostein; surviving; telomerase; prostate carcinoma tumor antigen-1, melanoma antigen recognized by T cells 1; Rat sarcoma (Ras) mutant; human Telomerase reverse transcriptase (hTERT); sarcoma translocation breakpoints; melanoma inhibitor of apoptosis (ML-IAP); ERG (transmembrane protease, serine 2 (TMPRSS2) ETS fusion gene); N-Acetyl glucosaminyl-transferase V (NA17); paired box protein Pax-3 (PAX3); Androgen receptor; Cyclin B1; v-myc avian myelocytomatosis viral oncogene neuroblastoma derived homolog (MYCN); Ras Homolog Family Member C (RhoC); Tyrosinase-related protein 2 (TRP-2); Cytochrome P450 1B1 (CYP1B1); CCCTC-Binding Factor (Zinc Finger Protein)-Like, Squamous Cell Carcinoma Antigen Recognized By T Cells 3 (SART3); Paired box protein Pax-5 (PAX5); proacrosin binding protein sp32 (OY-TES1); lymphocyte-specific protein tyrosine kinase (LCK); A kinase anchor protein 4 (AKAP-4); synovial sarcoma, X breakpoint 2 (SSX2); Receptor for Advanced Glycation Endproducts (RAGE-1); renal ubiquitous 1 (RU1); renal ubiquitous 2 (RU2); legumain; human papilloma virus E6 (HPV E6); human papilloma virus E7 (HPV E7); intestinal carboxyl esterase; heat shock protein 70-2 mutated (mut hsp70-2); CD79a; CD79b; CD72; Leukocyte-associated immunoglobulin-like receptor 1 (LAIR1); Fc fragment of IgA receptor (FCAR or CD89); Leukocyte immunoglobulin-like receptor subfamily A member 2 (LILRA2); CD300 molecule-like family member f (CD300LF); C-type lectin domain family 12 member A (CLEC12A); bone marrow stromal cell antigen 2 (BST2); EGF-like module-containing mucin-like hormone receptor-like 2 (EMR2); lymphocyte antigen 75 (LY75); Glypican-3 (GPC3); Fc receptor-like 5 (FCRL5); and immunoglobulin lambda-like polypeptide 1 (IGLL1);
(iii) said antigen binding domain binds an antigen selected from the group consisting of: CD19, CD123, BCMA, and CD20;
(iv) an antigen binding domain comprising an amino acid sequence selected from any one of SEQ ID NOs: 356-368 or 381;
(v) an antigen binding domain comprising an amino acid sequence selected from any one of SEQ ID NOs: 751, 756, 761, or 766;
(vi) an antigen binding domain comprising an amino acid sequence selected from any one of SEQ ID NOs: 382, 386, 390, 394, 398, 402, 406, 410, 414, 418, 422, 426, 430, 434, 438, 442, 446, 450, 454, 458, 462, 466, 470, 474, 478, 482, 486, 490, 494, 498, 502, 506, 510, 514, 518, 522, 528, 531, 534, or 537; and/or
(vii) an antigen binding domain comprising an amino acid sequence located at positions 470-712 or 470-939 of SEQ ID NO: 3033.

51.-53. (canceled)

54. The fusion protein of claim 50, wherein the fusion protein comprises:
(i) a chimeric antigen receptor comprising an amino acid sequence selected from any one of SEQ ID NOs: 897, 902, 907, 912, 917, 922, 927, 932, 937, 942, 947, 952, 956;
(ii) a chimeric antigen receptor comprising an amino acid sequence selected from any one of SEQ ID NOs: 750, 755, 760, or 765;
(iii) a chimeric antigen receptor comprising an amino acid sequence selected from any one of SEQ ID NOs: 789, 791, 793, 795, 797, 799, 801, 803, 805, 807, 809, 811, 813, 815, 817, 819, 821, 823, 825, 827, 829, 831, 833, 835, 837, 839, 841, 843, 845, 847, 849, 851, 853, 855, 857, or 859; or
(iv) a chimeric antigen receptor comprising an amino acid sequence of SEQ ID NO: 3033.

55.-63. (canceled)

64. The fusion protein of claim 6, wherein the degradation domain, is located:
a) N-terminal to said second protein domain; or
b) C-terminal to said second protein domain.

65. The fusion protein of claim 6, wherein:
(i) the fusion protein further comprises a signal peptide; and/or
(ii) the fusion protein further comprises a linker positioned between the signal peptide and another domain of the fusion protein.

66.-68. (canceled)

69. A nucleic acid encoding the fusion protein of claim 6.

70. A vector comprising the nucleic acid of claim 69.

71.-72. (canceled)

73. A viral particle comprising the vector of claim 70.

74. A cell, e.g., a host cell, comprising the fusion protein of claim 6.

75. The cell of claim 74, wherein:
(i) said cell is a human effector cell;
(ii) said cell further comprises a protease capable of cleaving said heterologous protease cleavage site; and/or
(iii) said cell further comprises an expression compound, wherein the expression compound is a stabilization compound.

76. (canceled)

77. The cell of claim 75, wherein:
(i) in the absence a stabilization compound, the fusion protein is degraded by cellular degradation pathways, wherein at least 50%, 60%, 70%, 80%, 90% or greater of the fusion protein is degraded; and/or
(ii) the level of cell surface expression or extracellular expression of the fusion protein is greater than the level of cell surface expression or extracellular expression of the fusion protein in a cell not comprising a stabilization compound, and wherein expression is 2, 3, 4, 5, 6, 7, 8, 9, 10, 20, or 30 fold greater.

78.-86. (canceled)

87. A method of conditionally expressing a protein of interest, transmembrane protein, or CAR, on the surface of a cell, said method comprising: contacting the fusion protein of claim 6, with an expression compound, wherein:
(a) in the presence of said expression compound, the surface expression of said protein of interest, transmembrane protein, or CAR, is increased, relative to the level of surface expression of said protein of interest, transmembrane protein, or CAR, in the absence of said expression compound; and
(b) in the absence of said expression compound, surface expression of said protein of interest, transmembrane protein, or CAR, is substantially decreased, relative to the level of surface expression of said protein of interest, transmembrane protein, or CAR, in the presence of the expression compound.

88.-89. (canceled)

90. A method of conditionally expressing a protein of interest, transmembrane protein, or CAR, said method comprising contacting the cell of claim 74 with a stabilization compound, wherein:
(a) in the presence of said stabilization compound, said conditional expression domain assumes a conformation more permissive to cleavage of the heterologous protease cleavage site relative to a conformation in the absence of expression compound,
thereby resulting in cleavage of said conditional expression domain from the protein of interest, transmembrane protein, or CAR and the expression of said protein of interest, transmembrane protein, or CAR; and
(b) in the absence of said stabilization compound, said conditional expression domain assumes a conformation more resistant to cleavage of the heterologous protease cleavage site relative to a conformation in the presence of expression compound, thereby resulting in degradation of said protein of interest, transmembrane protein, or CAR.

91.-92. (canceled)

93. A method of conditionally expressing a protein of interest, transmembrane protein, or CAR, said method comprising contacting the cell of claim 74, with a stabilization compound, wherein:
(a) in the presence of said stabilization compound,
(i) said degradation domain assumes a conformation more resistant to cellular degradation relative to a conformation in the absence of the stabilization compound,
thereby resulting in cleavage of said degradation domain from said protein of interest, transmembrane protein, or CAR and the expression of said protein of interest, transmembrane protein, or CAR; and
(b) in the absence of said stabilization compound, said degradation domain assumes a conformation more permissive to cellular degradation relative to a conformation in the presence of stabilization compound, thereby resulting in degradation of said protein of interest, transmembrane protein, or CAR.

94.-95. (canceled)

96. A method of conditionally expressing a protein of interest, transmembrane protein, or CAR, said method comprising contacting a cell comprising the fusion protein of claim 19 with a deaggregation compound, wherein:
(a) in the presence of said deaggregation compound,
(i) said aggregation domain assumes a conformation more resistant to aggregation or oligomerization relative to a conformation in the absence of the deaggregation compound,
thereby resulting in cleavage of said aggregation domain from said protein of interest, transmembrane protein, or CAR and the expression of said protein of interest, transmembrane protein, or CAR; and
(b) in the absence of said deaggregation compound, said aggregation domain assumes a conformation more permissive to aggregation or oligomerization relative to a conformation in the presence of the deaggregation compound, thereby resulting in aggregation of said protein of interest, transmembrane protein, or CAR.

97.-98. (canceled)

99. A method of treating a subject having a disease associated with expression of a tumor antigen, comprising administering to the subject an effective amount of the cell of claim 74, wherein said second protein is a chimeric antigen receptor and comprises, in a N-terminal to C-terminal direction, an antigen binding domain, a transmembrane domain, and one or more intracellular signaling domains and said antigen binding domain specifically binds said tumor antigen.

100. A method of treating an autoantibody or alloantibody disease or condition, the method comprising administering to the subject an effective amount of a cell comprising the fusion protein of claim 19, wherein said second protein is a chimeric antigen receptor and comprises, in a N-terminal to C-terminal direction, an antigen binding domain, a transmembrane domain, and one or more intracellular signaling domains and said antigen binding domain specifically binds an antigen specific of said autoantibody or alloantibody disease.

101.-103. (canceled)

104. The method of claim 99, wherein the cell, is contacted with a stabilization compound, and:
(a) in the presence of said stabilization compound,
(i) said degradation domain assumes a conformation more resistant to cellular degradation relative to a conformation in the absence of said stabilization compound,
thereby resulting in cleavage of said degradation domain from said chimeric antigen receptor (CAR) and the expression of said CAR; and
(b) in the absence of said stabilization compound, said degradation domain assumes a conformation more permissive to cellular degradation relative to a conformation in the presence of said stabilization compound, thereby resulting in degradation of said fusion protein.

105.-106. (canceled)

107. The method of claim 100 wherein the cell is contacted with a deaggregation compound, and:
(a) in the presence of said deaggregation compound,
(i) said aggregation domain assumes a conformation more resistant to aggregation or oligomerization relative to a conformation in the absence of said deaggregation compound,
thereby resulting in cleavage of said aggregation domain from said chimeric antigen receptor (CAR) and the expression of said CAR; and
(b) in the absence of said deaggregation compound, said aggregation domain assumes a conformation more permissive to aggregation or oligomerization relative to a conformation in the presence of said deaggregation compound, thereby resulting in aggregation of said fusion protein.

108. (canceled)

109. The method of claim 100, wherein:
(i) the autoantibody disease or condition is selected from the group consisting of bullous pemphigoid, epidermolysis bullosa acquisita, p200 pemphigoid, linear IgA bullous dermatosis, other pemphigoid group diseases, dermatitis herpetiformis, celiac disease, myasthenia gravis, Goodpasture's syndrome, granulomatosis with polyangiitis and other ANCA+ vasculitidies, autoimmune limbic encephalitis, anti-N-methyl-D-aspartate receptor encephalitis, neuromyelitis optica, autoimmune hemolytic anemia, autoantibody-associated end-organ damage in lupus and other connective tissue diseases (due to anti-dsDNA, anti-Ro, and other autoantibodies), Graves' and Hashimoto's thyroiditis, anti-insulin antibodies in diabetes, anti-insulin receptor antibodies in autoimmune hypoglycemia, cryoglobulinemia, rheumatoid arthritis, multiple sclerosis, Sjogren's syndrome, dermatomyositis, anti-Fc-epsilon receptor antibodies in chronic idiopathic urticaria, anti-folate receptor antibodies, anti-endothelial receptor or anti-adrenergic receptor antibodies in pulmonary arterial hypertension, refractory hypertension, dilated cadiomyopathy, and an autoinflammatory syndrome; or
(ii) the alloantibody disease or condition is an immune reaction in response to an organ transplant, blood transfusion, pregnancy, or protein replacement therapy.

110. (canceled)

111. The method of claim 99, wherein the disease associated with expression of a tumor antigen is a cancer.

112. The method of claim 111, wherein:
(i) the cancer is mesothelioma, malignant pleural mesothelioma, lung cancer non-small cell lung cancer, small cell lung cancer, squamous cell lung cancer, or large cell lung cancer, pancreatic cancer, pancreatic ductal adenocarcinoma, metastatic pancreatic ductal adenocarcinoma (PDA), esophageal adenocarcinoma, ovarian cancer, serous epithelial ovarian cancer, breast cancer, colorectal cancer, bladder cancer or any combination thereof;
(ii) the cancer is a hematological cancer chosen from a leukemia or a lymphoma;
(iii) the cancer is chosen from: chronic lymphocytic leukemia (CLL), mantle cell lymphoma (MCL), multiple myeloma, acute lymphoid leukemia (ALL), Hodgkin lymphoma, B-cell acute lymphoid leukemia (BALL), T-cell acute lymphoid leukemia (TALL), small lymphocytic leukemia (SLL), B cell prolymphocytic leukemia, blastic plasmacytoid dendritic cell neoplasm, Burkitt's lymphoma, diffuse large B cell lymphoma (DLBCL), DLBCL associated with chronic inflammation, chronic myeloid leukemia, myeloproliferative neoplasms, follicular lymphoma, pediatric follicular lymphoma, hairy cell leukemia, small cell- or a large cell-follicular lymphoma, malignant lymphoproliferative conditions, MALT lymphoma (extranodal marginal zone lymphoma of mucosa-associated lymphoid tissue), Marginal zone lymphoma, myelodysplasia, myelodysplastic syndrome, non-Hodgkin lymphoma, plasmablastic lymphoma, plasmacytoid dendritic cell neoplasm, Waldenstrom macroglobulinemia, splenic marginal zone lymphoma, splenic lymphoma/leukemia, splenic diffuse red pulp small B-cell lymphoma, hairy cell leukemia-variant, lymphoplasmacytic lymphoma, a heavy chain disease, plasma cell myeloma, solitary plasmocytoma of bone, extraosseous plasmocytoma, nodal marginal zone lymphoma, pediatric nodal marginal zone lymphoma, primary cutaneous follicle center lymphoma, lymphomatoid granulomatosis, primary mediastinal (thymic) large B-cell lymphoma, intravascular large B-cell lymphoma, ALK+ large B-cell lymphoma, large B-cell lymphoma arising in HHV8-associated multicentric Castleman disease, primary effusion lymphoma, B-cell lymphoma, acute myeloid leukemia (AML), or unclassifiable lymphoma; or
(iv) the cancer is chosen from MCL, CLL, ALL, Hodgkin lymphoma, AML, or multiple myeloma.

113.-117. (canceled)

118. A method of treating an autoantibody or alloantibody disease or condition in a subject in need thereof comprising administering an effective amount of a pharmaceutical composition comprising a modified T cell to the subject, wherein the modified T cell comprises:
(i) a nucleic acid comprising a suicide gene and a nucleic acid encoding a chimeric antigen receptor (CAR) comprising an anti-B cell binding domain, a transmembrane domain, a costimulatory domain and an intracellular signaling domain; or
(ii) a nucleic acid encoding a dimerization domain and a chimeric antigen receptor (CAR) comprising an anti-B cell binding domain, a transmembrane domain, a costimulatory domain and an intracellular signaling domain.

119. (canceled)

120. The method of claim 118, wherein:
(i) the suicide gene encodes the amino acid sequence selected from the group consisting of SEQ ID NOs: 3005-3007;
(ii) the suicide gene further comprises a dimerization domain comprising the amino acid sequence selected from the group consisting of SEQ ID NO: 3013 and 3014;
(iii) the suicide gene further comprises a dimerization domain comprising the amino acid sequence selected from the group consisting of SEQ ID NO: 3013 and 3014;
(iv) the dimerization domain comprises the amino acid sequence of SEQ ID NO: 980; and/or
(v) the CAR further comprises a signal peptide, wherein the signal peptide comprises the amino acid sequence of SEQ ID NO: 3035.

121.-157. (canceled)

158. An isolated nucleic acid sequence comprising:
(i) a nucleic acid sequence comprising a suicide gene comprising a nucleic acid sequence selected from the group consisting of SEQ ID NOs: 3001-3004; and a nucleic acid sequence encoding a chimeric antigen receptor (CAR) comprising an anti-B cell binding domain, a transmembrane domain, a costimulatory domain and an intracellular signaling domain, wherein the isolated nucleic acid sequence comprises SEQ ID NO: 3018, 3020, 3024, 3026, 3028 or 3030; or
(ii) a nucleic acid encoding a dimerization domain; and a chimeric antigen receptor (CAR) comprising an anti-B cell binding domain, a transmembrane domain, a costimulatory domain and an intracellular signaling domain, wherein
(a) the dimerization domain comprises the amino acid sequence of SEQ ID NO: 980; and/or
(b) the isolated nucleic acid sequence comprises SEQ ID NO: 977 or 3032.

159. (canceled)

160. An isolated polypeptide comprising:
(i) an amino acid sequence encoded by a suicide gene wherein the amino acid sequence is selected from the group consisting of SEQ ID NOs: 3005-3007; and a chimeric antigen receptor (CAR) comprising an anti-B cell binding domain, a transmembrane domain, a costimulatory domain and an intracellular signaling domain, wherein the isolated polypeptide comprises an amino acid sequence of SEQ ID NO: 3019, 3021, 3026, 3028, 3030 or 3034; or
(ii) a dimerization domain; and (ii) a chimeric antigen receptor (CAR) comprising an anti-B cell binding domain, a transmembrane domain, a costimulatory domain and an intracellular signaling domain, wherein the isolated polypeptide comprises an amino acid sequence of SEQ ID NO: 978 or 3033.

161.-166. (canceled)

The application's sequence listing, which the Patent Office published only in electronic form, follows.

SEQUENCE LISTING (3036 sequences)

SEQ ID NO: 1 - DNA, 1184 bp, Artificial Sequence
  source: /note="Description of Artificial Sequence: Synthetic polynucleotide"
cgtgaggctccggtgcccgtcagtgggcagagcgcacatcgcccacagtccccgagaagttggggggaggggtcggcaattgaaccggtgcctagagaaggtggcgcggggtaaactgggaaagtgatgtcgtgtactggctccgcctttttcccgagggtgggggagaaccgtatataagtgcagtagtcgccgtgaacgttctttttcgcaacgggtttgccgccagaacacaggtaagtgccgtgtgtggttcccgcgggcctggcctctttacgggttatggcccttgcgtgccttgaattacttccacctggctgcagtacgtgattcttgatcccgagcttcgggttggaagtgggtgggagagttcgaggccttgcgcttaaggagccccttcgcctcgtgcttgagttgaggcctggcctgggcgctggggccgccgcgtgcgaatctggtggcaccttcgcgcctgtctcgctgctttcgataagtctctagccatttaaaatttttgatgacctgctgcgacgctttttttctggcaagatagtcttgtaaatgcgggccaagatctgcacactggtatttcggtttttggggccgcgggcggcgacggggcccgtgcgtcccagcgcacatgttcggcgaggcggggcctgcgagcgcggccaccgagaatcggacgggggtagtctcaagctggccggcctgctctggtgcctggcctcgcgccgccgtgtatcgccccgccctgggcggcaaggctggcccggtcggcaccagttgcgtgagcggaaagatggccgcttcccggccctgctgcagggagctcaaaatggaggacgcggcgctcgggagagcgggcgggtgagtcacccacacaaaggaaaagggcctttccgtcctcagccgtcgcttcatgtgactccacggagtaccgggcgccgtccaggcacctcgattagttctcgagcttttggagtacgtcgtctttaggttggggggaggggttttatgcgatggagtttccccacactgagtgggtggagactgaagttaggccagcttggcacttgatgtaattctccttggaatttgccctttttgagtttggatcttggttcattctcaagcctcagacagtggttcaaagtttttttcttccatttcaggtgtcgtga

SEQ ID NO: 2 - protein, 21 aa, Artificial Sequence
  source: /note="Description of Artificial Sequence: Synthetic peptide"
MALPVTALLLPLALLLHAARP

SEQ ID NO: 3 - DNA, 63 bp, Artificial Sequence
  source: /note="Description of Artificial Sequence: Synthetic oligonucleotide"
atggccctgcctgtgacagccctgctgctgcctctggctctgctgctgcatgccgctagaccc

SEQ ID NO: 4 - protein, 45 aa, Artificial Sequence
  source: /note="Description of Artificial Sequence: Synthetic polypeptide"
TTTPAPRPPTPAPTIASQPLSLRPEACRPAAGGAVHTRGLDFACD

SEQ ID NO: 5 - DNA, 135 bp, Artificial Sequence
  source: /note="Description of Artificial Sequence: Synthetic polynucleotide"
accacgacgccagcgccgcgaccaccaacaccggcgcccaccatcgcgtcgcagcccctgtccctgcgcccagaggcgtgccggccagcggcggggggcgcagtgcacacgagggggctggacttcgcctgtgat

SEQ ID NO: 6 - protein, 230 aa, Artificial Sequence
  source: /note="Description of Artificial Sequence: Synthetic polypeptide"
ESKYGPPCPPCPAPEFLGGPSVFLFPPKPKDTLMISRTPEVTCVVVDVSQEDPEVQFNWYVDGVEVHNAKTKPREEQFNSTYRVVSVLTVLHQDWLNGKEYKCKVSNKGLPSSIEKTISKAKGQPREPQVYTLPPSQEEMTKNQVSLTCLVKGFYPSDIAVEWESNGQPENNYKTTPPVLDSDGSFFLYSRLTVDKSRWQEGNVFSCSVMHEALHNHYTQKSLSLSLGKM

SEQ ID NO: 7 - DNA, 690 bp, Artificial Sequence
  source: /note="Description of Artificial Sequence: Synthetic polynucleotide"
gagagcaagtacggccctccctgccccccttgccctgcccccgagttcctgggcggacccagcgtgttcctgttcccccccaagcccaaggacaccctgatgatcagccggacccccgaggtgacctgtgtggtggtggacgtgtcccaggaggaccccgaggtccagttcaactggtacgtggacggcgtggaggtgcacaacgccaagaccaagccccgggaggagcagttcaatagcacctaccgggtggtgtccgtgctgaccgtgctgcaccaggactggctgaacggcaaggaatacaagtgtaaggtgtccaacaagggcctgcccagcagcatcgagaaaaccatcagcaaggccaagggccagcctcgggagccccaggtgtacaccctgccccctagccaagaggagatgaccaagaaccaggtgtccctgacctgcctggtgaagggcttctaccccagcgacatcgccgtggagtgggagagcaacggccagcccgagaacaactacaagaccaccccccctgtgctggacagcgacggcagcttcttcctgtacagccggctgaccgtggacaagagccggtggcaggagggcaacgtctttagctgctccgtgatgcacgaggccctgcacaaccactacacccagaagagcctgagcctgtccctgggcaagatg

SEQ ID NO: 8 - protein, 282 aa, Artificial Sequence
  source: /note="Description of Artificial Sequence: Synthetic polypeptide"
RWPESPKAQASSVPTAQPQAEGSLAKATTAPATTRNTGRGGEEKKKEKEKEEQEERETKTPECPSHTQPLGVYLLTPAVQDLWLRDKATFTCFVVGSDLKDAHLTWEVAGKVPTGGVEEGLLERHSNGSQSQHSRLTLPRSLWNAGTSVTCTLNHPSLPPQRLMALREPAAQAPVKLSLNLLASSDPPEAASWLLCEVSGFSPPNILLMWLEDQREVNTSGFAPARPPPQPGSTTFWAWSVLRVPAPPSPQPATYTCVVSHEDSRTLLNASRSLEVSYVTDH

SEQ ID NO: 9 - DNA, 847 bp, Artificial Sequence
  source: /note="Description of Artificial Sequence: Synthetic polynucleotide"
aggtggcccgaaagtcccaaggcccaggcatctagtgttcctactgcacagccccaggcagaaggcagcctagccaaagctactactgcacctgccactacgcgcaatactggccgtggcggggaggagaagaaaaaggagaaagagaaagaagaacaggaagagagggagaccaagacccctgaatgtccatcccatacccagccgctgggcgtctatctcttgactcccgcagtacaggacttgtggcttagagataaggccacctttacatgtttcgtcgtgggctctgacctgaaggatgcccatttgacttgggaggttgccggaaaggtacccacagggggggttgaggaagggttgctggagcgccattccaatggctctcagagccagcactcaagactcacccttccgagatccctgtggaacgccgggacctctgtcacatgtactctaaatcatcctagcctgcccccacagcgtctgatggcccttagagagccagccgcccaggcaccagttaagcttagcctgaatctgctcgccagtagtgatcccccagaggccgccagctggctcttatgcgaagtgtccggctttagcccgcccaacatcttgctcatgtggctggaggaccagcgagaagtgaacaccagcggcttcgctccagcccggcccccaccccagccgggttctaccacattctgggcctggagtgtcttaagggtcccagcaccacctagcccccagccagccacatacacctgtgttgtgtcccatgaagatagcaggaccctgctaaatgcttctaggagtctggaggtttcctacgtgactgaccatt

SEQ ID NO: 10 - protein, 10 aa, Artificial Sequence
  source: /note="Description of Artificial Sequence: Synthetic peptide"
GGGGSGGGGS

SEQ ID NO: 11 - DNA, 30 bp, Artificial Sequence
  source: /note="Description of Artificial Sequence: Synthetic oligonucleotide"
ggtggcggaggttctggaggtggaggttcc

SEQ ID NO: 12 - protein, 24 aa, Artificial Sequence
  source: /note="Description of Artificial Sequence: Synthetic peptide"
IYIWAPLAGTCGVLLLSLVITLYC

SEQ ID NO: 13 - DNA, 72 bp, Artificial Sequence
  source: /note="Description of Artificial Sequence: Synthetic oligonucleotide"
atctacatctgggcgcccttggccgggacttgtggggtccttctcctgtcactggttatcaccctttactgc

SEQ ID NO: 14 - protein, 42 aa, Artificial Sequence
  source: /note="Description of Artificial Sequence: Synthetic polypeptide"
KRGRKKLLYIFKQPFMRPVQTTQEEDGCSCRFPEEEEGGCEL

SEQ ID NO: 15 - DNA, 126 bp, Artificial Sequence
  source: /note="Description of Artificial Sequence: Synthetic polynucleotide"
aaacggggcagaaagaaactcctgtatatattcaaacaaccatttatgagaccagtacaaactactcaagaggaagatggctgtagctgccgatttccagaagaagaagaaggaggatgtgaactg

SEQ ID NO: 16 - protein, 48 aa, Artificial Sequence
  source: /note="Description of Artificial Sequence: Synthetic polypeptide"
QRRKYRSNKGESPVEPAEPCRYSCPREEEGSTIPIQEDYRKPEPACSP

SEQ ID NO: 17 - DNA, 123 bp, Artificial Sequence
  source: /note="Description of Artificial Sequence: Synthetic polynucleotide"
aggagtaagaggagcaggctcctgcacagtgactacatgaacatgactccccgccgccccgggcccacccgcaagcattaccagccctatgccccaccacgcgacttcgcagcctatcgctcc

SEQ ID NO: 18 - protein, 112 aa, Artificial Sequence
  source: /note="Description of Artificial Sequence: Synthetic polypeptide"
RVKFSRSADAPAYKQGQNQLYNELNLGRREEYDVLDKRRGRDPEMGGKPRRKNPQEGLYNELQKDKMAEAYSEIGMKGERRRGKGHDGLYQGLSTATKDTYDALHMQALPPR

SEQ ID NO: 19 - DNA, 336 bp, Artificial Sequence
  source: /note="Description of Artificial Sequence: Synthetic polynucleotide"
agagtgaagttcagcaggagcgcagacgcccccgcgtacaagcagggccagaaccagctctataacgagctcaatctaggacgaagagaggagtacgatgttttggacaagagacgtggccgggaccctgagatggggggaaagccgagaaggaagaaccctcaggaaggcctgtacaatgaactgcagaaagataagatggcggaggcctacagtgagattgggatgaaaggcgagcgccggaggggcaaggggcacgatggcctttaccagggtctcagtacagccaccaaggacacctacgacgcccttcacatgcaggccctgccccctcgc

SEQ ID NO: 20 - protein, 112 aa, Artificial Sequence
  source: /note="Description of Artificial Sequence: Synthetic polypeptide"
RVKFSRSADAPAYQQGQNQLYNELNLGRREEYDVLDKRRGRDPEMGGKPRRKNPQEGLYNELQKDKMAEAYSEIGMKGERRRGKGHDGLYQGLSTATKDTYDALHMQALPPR

SEQ ID NO: 21 - DNA, 336 bp, Artificial Sequence
  source: /note="Description of Artificial Sequence: Synthetic polynucleotide"
agagtgaagttcagcaggagcgcagacgcccccgcgtaccagcagggccagaaccagctctataacgagctcaatctaggacgaagagaggagtacgatgttttggacaagagacgtggccgggaccctgagatggggggaaagccgagaaggaagaaccctcaggaaggcctgtacaatgaactgcagaaagataagatggcggaggcctacagtgagattgggatgaaaggcgagcgccggaggggcaaggggcacgatggcctttaccagggtctcagtacagccaccaaggacacctacgacgcccttcacatgcaggccctgccccctcgc

SEQ ID NO: 22 - protein, 5 aa, Artificial Sequence
  source: /note="Description of Artificial Sequence: Synthetic peptide"
GGGGS

SEQ ID NO: 23 - DNA, 30 bp, Artificial Sequence; identical to SEQ ID NO: 11
  source: /note="Description of Artificial Sequence: Synthetic oligonucleotide"

SEQ ID NO: 24 - protein, 150 aa, Artificial Sequence [sequence omitted]

SEQ ID NO: 25 - DNA, 450 bp, Artificial Sequence
  source: /note="Description of Artificial Sequence: Synthetic polynucleotide"
cccggatggtttctggactctccggatcgcccgtggaatcccccaaccttctcaccggcactcttggttgtgactgagggcgataatgcgaccttcacgtgctcgttctccaacacctccgaatcattcgtgctgaactggtaccgcatgagcccgtcaaaccagaccgacaagctcgccgcgtttccggaagatcggtcgcaaccgggacaggattgtcggttccgcgtgactcaactgccgaatggcagagacttccacatgagcgtggtccgcgctaggcgaaacgactccgggacctacctgtgcggagccatctcgctggcgcctaaggcccaaatcaaagagagcttgagggccgaactgagagtgaccgagcgcagagctgaggtgccaactgcacatccatccccatcgcctcggcctgcggggcagtttcagaccctggtc

SEQ ID NO: 26 - protein, 394 aa, Artificial Sequence
  source: /note="Description of Artificial Sequence: Synthetic polypeptide"
MALPVTALLLPLALLLHAARPPGWFLDSPDRPWNPPTFSPALLVVTEGDNATFTCSFSNTSESFVLNWYRMSPSNQTDKLAAFPEDRSQPGQDCRFRVTQLPNGRDFHMSVVRARRNDSGTYLCGAISLAPKAQIKESLRAELRVTERRAEVPTAHPSPSPRPAGQFQTLVTTTPAPRPPTPAPTIASQPLSLRPEACRPAAGGAVHTRGLDFACDIYIWAPLAGTCGVLLLSLVITLYCKRGRKKLLYIFKQPFMRPVQTTQEEDGCSCRFPEEEEGGCELRVKFSRSADAPAYKQGQNQLYNELNLGRREEYDVLDKRRGRDPEMGGKPRRKNPQEGLYNELQKDKMAEAYSEIGMKGERRRGKGHDGLYQGLSTATKDTYDALHMQALPPR

SEQ ID NO: 27 - DNA, 1182 bp, Artificial Sequence
  source: /note="Description of Artificial Sequence: Synthetic polynucleotide"
atggccctccctgtcactgccctgcttctccccctcgcactcctgctccacgccgctagaccacccggatggtttctggactctccggatcgcccgtggaatcccccaaccttctcaccggcactcttggttgtgactgagggcgataatgcgaccttcacgtgctcgttctccaacacctccgaatcattcgtgctgaactggtaccgcatgagcccgtcaaaccagaccgacaagctcgccgcgtttccggaagatcggtcgcaaccgggacaggattgtcggttccgcgtgactcaactgccgaatggcagagacttccacatgagcgtggtccgcgctaggcgaaacgactccgggacctacctgtgcggagccatctcgctggcgcctaaggcccaaatcaaagagagcttgagggccgaactgagagtgaccgagcgcagagctgaggtgccaactgcacatccatccccatcgcctcggcctgcggggcagtttcagaccctggtcacgaccactccggcgccgcgcccaccgactccggccccaactatcgcgagccagcccctgtcgctgaggccggaagcatgccgccctgccgccggaggtgctgtgcatacccggggattggacttcgcatgcgacatctacatttgggctcctctcgccggaacttgtggcgtgctccttctgtccctggtcatcaccctgtactgcaagcggggtcggaaaaagcttctgtacattttcaagcagcccttcatgaggcccgtgcaaaccacccaggaggaggacggttgctcctgccggttccccgaagaggaagaaggaggttgcgagctgcgcgtgaagttctcccggagcgccgacgcccccgcctataagcagggccagaaccagctgtacaacgaactgaacctgggacggcgggaagagtacgatgtgctggacaagcggcgcggccgggaccccgaaatgggcgggaagcctagaagaaagaaccctcaggaaggcctgtataacgagctgcagaaggacaagatggccgaggcctactccgaaattgggatgaagggagagcggcggaggggaaaggggcacgacggcctgtaccaaggactgtccaccgccaccaaggacacatacgatgccctgcacatgcaggcccttccccctcgc

SEQ ID NO: 28 - protein, 40 aa, Artificial Sequence
  source: /note="Description of Artificial Sequence: Synthetic polypeptide"
  MISC_FEATURE (1)..(40): /note="This sequence may encompass 1-10 'Gly Gly Gly Ser' repeating units"
GGGSGGGSGGGSGGGSGGGSGGGSGGGSGGGSGGGSGGGS

SEQ ID NO: 29 - protein, 20 aa, Artificial Sequence
  source: /note="Description of Artificial Sequence: Synthetic peptide"
GGGGSGGGGSGGGGSGGGGS

SEQ ID NO: 30 - protein, 15 aa, Artificial Sequence
  source: /note="Description of Artificial Sequence: Synthetic peptide"
GGGGSGGGGSGGGGS

SEQ ID NO: 31 - protein, 4 aa, Artificial Sequence
  source: /note="Description of Artificial Sequence: Synthetic peptide"
GGGS

SEQ ID NO: 32 - DNA, 5000 bp, Artificial Sequence
  source: /note="Description of Artificial Sequence: Synthetic polynucleotide"
  misc_feature (1)..(5000): /note="This sequence may encompass 50-5000 nucleotides"
  source: /note="See specification as filed for detailed description of substitutions and preferred embodiments"
aaaaaaaaaaaaaaaaaaaaaaaaaaaaaaaaaaaaaaaaaaaaaaaaaaaaaaaaaaaaaaaaaaaaaaaaaaaaaaaaaaaaaaaaaaaaaaaaaaaaaaaaaaaaaaaaaaaaaaaaaaaaaaaaaaaaaaaaaaaaaaaaaaaaaaaaaaaaaaaaaaaaaaaaaaaaaaaaaaaaaaaaaaaaaaaaaaaaaaaaaaaaaaaaaaaaaaaaaaaaaaaaaaaaaaaaaaaaaaaaaaaaaaaaaaaaaaaaaaaaaaaaaaaaaaaaaaaaaaaaaaaaaaaaaaaaaaaaaaaaaaaaaaaaaaaaaaaaaaaaaaaaaaaaaaaaaaaaaaaaaaaaaaaaaaaaaaaaaaaaaaaaaaaaaaaaaaaaaaaaaaaaaaaaaaaaaaaaaaaaaaaaaaaaaaaaaaaaaaaaaaaaaaaaaaaaaaaaaaaaaaaaaaaaaaaaaaaaaaaaaaaaaaaaaaaaaaaaaaaaaaaaaaaaaaaaaaaaaaaaaaaaaaaaaaaaaaaaaaaaaaaaaaaaaaaaaaaaaaaaaaaaaaaaaaaaaaaaaaaaaaaaaaaaaaaaaaaaaaaaaaaaaaaaaaaaaaaaaaaaaaaaaaaaaaaaaaaaaaaaaaaaaaaaaaaaaaaaaaaaaaaaaaaaaaaaaaaaaaaaaaaaaaaaaaaaaaaaaaaaaaaaaaaaaaaaaaaaaaaaaaaaaaaaaaaaaaaaaaaaaaaaaaaaaaaaaaaaaaaaaaaaaaaaaaaaaaaaaaaaaaaaaaaaaaaaaaaaaaaaaaaaaaaaaaaaaaaaaaaaaaaaaaaaaaaaaaaaaaaaaaaaaaaaaaaaaaaaaaaaaaaaaaaaaaaaaaaaaaaaaaaaaaaaaaaaaaaaaaaaaaaaaaaaaaaaaaaaaaaaaaaaaaaaaaaaaaaaaaaaaaaaaaaaaaaaaaaaaaaaaaaaaaaaaaaaaaaaaaaaaaaaaaaaaaaaaaaaaaaaaaaaaaaaaaaaaaaaaaaaaaaaaaaaaaaaaaaaaaaaaaaaaaaaaaaaaaaaaaaaaaaaaaaaaaaaaaaaaaaaaaaaaaaaaaaaaaaaaaaaaaaaaaaaaaaaaaaaaaaaaaaaaaaaaaaaaaaaaaaaaaaaaaaaaaaaaaaaaaaaaaaaaaaaaaaaaaaaaaaaaaaaaaaaaaaaaaaaaaaaaaaaaaaaaaaaaaaaaaaaaaaaaaaaaaaaaaaaaaaaaaaaaaaaaaaaaaaaaaaaaaaaaaaaaaaaaaaaaaaaaaaaaaaaaaaaaaaaaaaaaaaaaaaaaaaaaaaaaaaaaaaaaaaaaaaaaaaaaaaaaaaaaaaaaaaaaaaaaaaaaaaaaaaaaaaaaaaaaaaaaaaaaaaaaaaaaaaaaaaaaaaaaaaaaaaaaaaaaaaaaaaaaaaaaaaaaaaaaaaaaaaaaaaaaaaaaaaaaaaaaaaaaaaaaaaaaaaaaaaaaaaaaaaaaaaaaaaaaaaaaaaaaaaaaaaaaaaaaaaaaaaaaaaaaaaaaaaaaaaaaaaaaaaaaaaaaaaaaaaaaaaaaaaaaaaaaaaaaaaaaaaaaaaaaaaaaaaaaaaaaaaaaaaaaaaaaaaaaaaaaaaaaaaaaaaaaaaaaaaaaaaaaaaaaaaaaaaaaaaaaaaaaaaaaaaaaaaaaaaaaaaaaaaaaaaaaaaaaaaaaaaaaaaaaaaaaaaaaaaaaaaaaaaaaaaaaaaaaaaaaaaaaaaaaaaaaaaaaaaaaaaaaaaaaaaaaaaaaaaaaaaaaaaaaaaaaaaaaaaaaaaaaaaaaaaaaaaaaaaaaaaaaaaaaaaaaaaaaaaaaaaaaaaaaaaaaaaaaaaaaaaaaaaaaaaaaaaaaaaaaaaaaaaaaaaaaaaaaaaaaaaaaaaaaaaaaaaaaaaaaaaaaaaaaaaaaaaaaaaaaaaaaaaaaaaaaaaaaaaaaaaaaaaaaaaaaaaaaaaaaaaaaaaaaaaaaaaaaaaaaaaaaaaaaaaaaaaaaaaaaaaaaaaaaaaaaaaaaaaaaaaaaaaaaaaaaaaaaaaaaaaaaaaaaaaaaaaaaaaaaaaaaaaaaaaaaaaaaaaaaaaaaaaaaaaaaaaaaaaaaaaaaaaaaaaaaaaaaaaaaaaaaaaaaaaaaaaaaaaaaaaaaaaaaaaaaaaaaaaaaaaaaaaaaaaaaaaaaaaaaaaaaaaaaaaaaaaaaaaaaaaaaaaaaaaaaaaaaaaaaaaaaaaaaaaaaaaaaaaaaaaaaaaaaaaaaaaaaaaaaaaaaaaaaaaaaaaaaaaaaaaaaaaaaaaaaaaaaaaaaaaaaaaaaaaaaaaaaaaaaaaaaaaaaaaaaaaaaaaaaaaaaaaaaaaaaaaaaaaaaaaaaaaaaaaaaaaaaaaaaaaaaaaaaaaaaaaaaaaaaaaaaaaaaaaaaaaaaaaaaaaaaaaaaaaaaaaaaaaaaaaaaaaaaaaaaaaaaaaaaaaaaaaaaaaaaaaaaaaaaaaaaaaaaaaaaaaaaaaaaaaaaaaaaaaaaaaaaaaaaaaaaaaaaaaaaaaaaaaaaaaaaaaaaaaaaaaaaaaaaaaaaaaaaaaaaaaaaaaaaaaaaaaaaaaaaaaaaaaaaaaaaaaaaaaaaaaaaaaaaaaaaaaaaaaaaaaaaaaaaaaaaaaaaaaaaaaaaaaaaaaaaaaaaaaaaaaaaaaaaaaaaaaaaaaaaaaaaaaaaaaaaaaaaaaaaaaaaaaaaaaaaaaaaaaaaaaaaaaaaaaaaaaaaaaaaaaaaaaaaaaaaaaaaaaaaaaaaaaaaaaaaaaaaaaaaaaaaaaaaaaaaaaaaaaaaaaaaaaaaaaaaaaaaaaaaaaaaaaaaaaaaaaaaaaaaaaaaaaaaaaaaaaaaaaaaaaaaaaaaaaaaaaaaaaaaaaaaaaaaaaaaaaaaaaaaaaaaaaaaaaaaaaaaaaaaaaaaaaaaaaaaaaaaaaaaaaaaaaaaaaaaaaaaaaaaaaaaaaaaaaaaaaaaaaaaaaaaaaaaaaaaaaaaaaaaaaaaaaaaaaaaaaaaaaaaaaaaaaaaaaaaaaaaaaaaaaaaaaaaaaaaaaaaaaaaaaaaaaaaaaaaaaaaaaaaaaaaaaaaaaaaaaaaaaaaaaaaaaaaaaaaaaaaaaaaaaaaaaaaaaaaaaaaaaaaaaaaaaaaaaaaaaaaaaaaaaaaaaaaaaaaaaaaaaaaaaaaaaaaaaaaaaaaaaaaaaaaaaaaaaaaaaaaaaaaaaaaaaaaaaaaaaaaaaaaaaaaaaaaaaaaaaaaaaaaaaaaaaaaaaaaaaaaaaaaaaaaaaaaaaaaaaaaaaaaaaaaaaaaaaaaaaaaaaaaaaaaaaaaaaaaaaaaaaaaaaaaaaaaaaaaaaaaaaaaaaaaaaaaaaaaaaaaaaaaaaaaaaaaaaaaaaaaaaaaaaaaaaaaaaaaaaaaaaaaaaaaaaaaaaaaaaaaaaaaaaaaaaaaaaaaaaaaaaaaaaaaaaaaaaaaaaaaaaaaaaaaaaaaaaaaaaaaaaaaaaaaaaaaaaaaaaaaaaaaaaaaaaaaaaaaaaaaaaaaaaaaaaaaaaaaaaaaaaaaaaaaaaaaaaaaaaaaaaaaaaaaaaaaaaaaaaaaaaaaaaaaaaaaaaaaaaaaaaaaaaaaaaaaaaaaaaaaaaaaaaaaaaaaaaaaaaaaaaaaaaaaaaaaaaaaaaaaaaaaaaaaaaaaaaaaaaaaaaaaaaaaaaaaaaaaaaaaaaaaaaaaaaaaaaaaaaaaaaaaaaaaaaaaaaaaaaaaaaaaaaaaaaaaaaaaaaaaaaaaaaaaaaaaaaaaaaaaaaaaaaaaaaaaaaaaaaaaaaaaaaaaaaaaaaaaaaaaaaaaaaaaaaaaaaaaaaaaaaaaaaaaaaaaaaaaaaaaaaaaaaaaaaaaaaaaaaaaaaaaaaaaaaaaaaaaaaaaaaaaaaaaaaaaaaaaaaaaaaaaaaaaaaaaaaaaaaaaaaaaaaaaaaaaaaaaaaaaaaaaaaaaaaaaaaaaaaaaaaaaaaaaaaaaaaaaaaaaaaaaaaaaaaaaaaaaaaaaaaaaaaaaaaaaaaaaaaaaaaaaaaaaaaaaaaaaaaaaaaaaaaaaaaaaaaaaaaaaaaaaaaaaaaaaaaaaaaaaaaaaaaaaaaaaaaaaaaaaaaaaaaaaaaaaaaaaaaaaaaaaaaaaaaaaaaaaaaaaaaaaaaaaaaaaaaaaaaaaaaaaaaaaaaaaaaaaaaaaaaaaaaaaaaaaaaaaaaaaaaaaaaaaaaaaaaaaaaaaaaaaaaaaaaaaaaaaaaaaaaaaaaaaaaaaaaaaaaaaaaaaaaaaaaaaaaaaaaaaaaaaaaaaaaaaaaaaaaaaaaaaaaaaaaaaaaaaaaaaaaaaaaaaaaaaaaaaaaaaaaaaaaaaaaaaaaaaaaaaaaaaaaaaaaaaaaaaaaaaaaaaaaaaaaaaaaaaaaaaaaaaaaaaaaaaaaaaaaaaaaaaaaaaaaaaaaaaaaaaaaaaaaaaaaaaaaaaaaaaaaaaaaaaaaaaaaaaaaaaaaaaaaaaaaaaaaaaaaaaaaaaaaaaaaaaaaaaaaaaaaaaaaaaaaaaaaaaaaaaaaaaaaaaaaaaaaaaaaaaaaaaaaaaaaaaaaaaaaaaaaaaaaaaaaaaaaaaaaaaaaaaaaaaaaaaaaaaaaaaaaaaaaaaaaaaaaaaaaaaaaaaaaaaaaaaaaaaaaaaaaaaaaaaaaaaaaaaaaaaaaaaaaaaaaaaaaaaaaaaaaaaaaaaaaaaaaaaaaaaaaaaaaaaaaaaaaaaaaaaaaaaaaaaaaaaaaaaaaaaaaaaaaaaaaaaaaaaaaaaaaaaaaaaaaaaaaaaaaaaaaaaaaaaaaaaaaaaaaaaaaaaaaaaaaaaaaaaaaaaaaaaaaaaaaaaaaaaaaaaaaaaaaaaaaaaaaaaaaaaaaaaaaaaaaaaaaaaaaaaaaaaaaaaaaaaaaaaaaaaaaaaaaaaaaaaaaaaaaaaaaaaaaaaaaa

SEQ ID NO: 33 - DNA, 63 bp, Artificial Sequence
  source: /note="Description of Artificial Sequence: Synthetic oligonucleotide"
atggccctccctgtcaccgccctgctgcttccgctggctcttctgctccacgccgctcggccc

SEQ ID NO: 34 - DNA, 72 bp, Artificial Sequence
  source: /note="Description of Artificial Sequence: Synthetic oligonucleotide"
atctacatttgggcccctctggctggtacttgcggggtcctgctgctttcactcgtgatcactctttactgt

SEQ ID NO: 35 - protein, 5 aa, Unknown
  source: /note="Description of Unknown: Granzyme B sequence"
  MOD_RES (5)..(5): Any amino acid
IEPDX

SEQ ID NO: 36 - protein, 5 aa, Unknown
  source: /note="Description of Unknown: Enterokinase sequence"
DDDDK

SEQ ID NO: 37 - protein, 6 aa, Unknown
  source: /note="Description of Unknown: Genenase sequence"
PGAAHY

SEQ ID NO: 38 - protein, 7 aa, Unknown
  source: /note="Description of Unknown: PreScission protease sequence"
LEVFQGP

SEQ ID NO: 39 - protein, 373 aa, Artificial Sequence
  source: /note="Description of Artificial Sequence: Synthetic polypeptide"
PGWFLDSPDRPWNPPTFSPALLVVTEGDNATFTCSFSNTSESFVLNWYRMSPSNQTDKLAAFPEDRSQPGQDCRFRVTQLPNGRDFHMSVVRARRNDSGTYLCGAISLAPKAQIKESLRAELRVTERRAEVPTAHPSPSPRPAGQFQTLVTTTPAPRPPTPAPTIASQPLSLRPEACRPAAGGAVHTRGLDFACDIYIWAPLAGTCGVLLLSLVITLYCKRGRKKLLYIFKQPFMRPVQTTQEEDGCSCRFPEEEEGGCELRVKFSRSADAPAYKQGQNQLYNELNLGRREEYDVLDKRRGRDPEMGGKPRRKNPQEGLYNELQKDKMAEAYSEIGMKGERRRGKGHDGLYQGLSTATKDTYDALHMQALPPR

SEQ ID NO: 40 - protein, 6 aa, Unknown
  source: /note="Description of Unknown: Thrombin sequence"
LVPRGS

SEQ ID NO: 41 - protein, 7 aa, Unknown
  source: /note="Description of Unknown: TEV protease sequence"
ENLYFQG

SEQ ID NO: 42 - protein, 2 aa, Unknown
  source: /note="Description of Unknown: Elastase 1 sequence"
  VARIANT (1)..(1): /replace="Gly" or "Ser" or "Val"
  MOD_RES (2)..(2): Any amino acid
  MISC_FEATURE (1)..(2): /note="Variant residues given in the sequence have no preference with respect to those in the annotations for variant positions"
AX

SEQ ID NO: 43 - protein, 22 aa, Artificial Sequence
  source: /note="Description of Artificial Sequence: Synthetic peptide"
MLLLVTSLLLCELPHPAFLLIP

SEQ ID NO: 44 - protein, 20 aa, Artificial Sequence
  source: /note="Description of Artificial Sequence: Synthetic peptide"
MYRMQLLSCIALSLALVTNS

SEQ ID NO: 45 - protein, 21 aa, Artificial Sequence
  source: /note="Description of Artificial Sequence: Synthetic peptide"
MAQVKLQESGTELAKPGAAVK

SEQ ID NO: 46 - protein, 19 aa, Artificial Sequence
  source: /note="Description of Artificial Sequence: Synthetic peptide"
MRFLAATFLLLALSTAAQA

SEQ ID NO: 47 - protein, 4 aa, Artificial Sequence
  source: /note="Description of Artificial Sequence: Synthetic peptide"
KDEL

SEQ ID NO: 48 - protein, 787 aa, Artificial Sequence
  source: /note="Description of Artificial Sequence: Synthetic polypeptide"
MALPVTALLLPLALLLHAARPRSSLALSLTADQMVSALLDAEPPILYSEYDPTRPFSEASMMGLLTNLADRELVHMINWAKRVPGFVDLALHDQVHLLECAWMEILMIGLVWRSMEHPGKLLFAPNLLLDRNQGKCVEGGVEIFDMLLATSSRFRMMNLQGEEFVCLKSIILLNSGVYTFLSSTLKSLEEKDHIHRVLDKITDTLIHLMAKAGLTLQQQHQRLAQLLLILSHIRHMSSKRMEHLYSMKCKNVVPLSDLLLEMLDAHRLRTKRIWELKKDVYVVELDWYPDAPGEMVVLTCDTPEEDGITWTLDQSSEVLGSGKTLTIQVKEFGDAGQYTCHKGGEVLSHSLLLLHKKEDGIWSTDILKDQKEPKNKTFLRCEAKNYSGRFTCWWLTTISTDLTFSVKSSRGSSDPQGVTCGAATLSAERVRGDNKEYEYSVECQEDSACPAAEESLPIEVMVDAVHKLKYENYTSSFFIRDIIKPDPPKNLQLKPLKNSRQVEVSWEYPDTWSTPHSYFSLTFCVQVQGKSKREKKDRVFTDKTSATVICRKNASISVRAQDRYYSSSWSEWASVPCSGGGSGGGSGGGSRNLPVATPDPGMFPCLHHSQNLLRAVSNMLQKARQTLEFYPCTSEEIDHEDITKDKTSTVEACLPLELTKNESCLNSRETSFITNGSCLASRKTSFMMALCLSSIYEDLKMYQVEFKTMNAKLLMDPKRQIFLDQNMLAVIDELMQALNFNSETVPQKSSLEEPDFYKTKIKLCILLHAFRIRAVTIDRVMSYLNAS

SEQ ID NO: 49 - DNA, 816 bp, Artificial Sequence
  source: /note="Description of Artificial Sequence: Synthetic polynucleotide"
atggccctccctgtcaccgccctgctgcttccgctggctcttctgctccacgccgctcggccccggtcgtcgttggcactttccctgactgccgaccagatggtgtccgcccttctggacgccgagcctccaattctgtactcggagtacgatccgactcgcccgttctccgaagccagcatgatgggcctgttgactaacctggcggaccgcgagttggtgcacatgattaactgggctaagcgggtgccgggcttcgtggacctggccctgcacgaccaagtgcacctcctggaatgcgcctggatggaaatcctcatgatcggcctcgtgtggagatccatggagcatcccggaaagctcctgtttgcacccaacctcctgcttgatcgcaaccagggaaaatgcgtggaagggggtgtcgagattttcgacatgctgctcgccacctcttcccggttccggatgatgaatctgcagggagaagagttcgtgtgtctgaagtcaatcatcctgctgaactccggggtctataccttcctgagctcgaccctcaagtcactggaggaaaaagaccacatccatcgcgtgctcgataagatcaccgacacccttatccatctcatggcgaaggctggactgaccctgcaacagcagcaccagaggctggcccagttgctgctgattctgagccacatccggcacatgtcgtccaagaggatggaacacctgtacagcatgaagtgcaagaacgtcgtgcctctgtccgatctgctcctggaaatgctggacgcgcacagactccgtactaaaaga

SEQ ID NO: 50-51 - skipped (2 entries)

SEQ ID NO: 52 - protein, 17 aa, Artificial Sequence
  source: /note="Description of Artificial Sequence: Synthetic peptide"
GGGSGGGSGGGSRNLPV

SEQ ID NO: 53 - DNA, 63 bp, Artificial Sequence
  source: /note="Description of Artificial Sequence: Synthetic oligonucleotide"
gtggtggcggtggaagcggcggtggcggaagcggcggtggcggcagcagaaacctccccgtgg

SEQ ID NO: 54-55 - skipped (2 entries)

SEQ ID NO: 56 - protein, 107 aa, Artificial Sequence
  source: /note="Description of Artificial Sequence: Synthetic polypeptide"
GVQVETISPGDGRTFPKRGQTCVVHYTGMLEDGKKVDSSRDRNKPFKFMLGKQEVIRGWEEGVAQMSVGQRAKLTISPDYAYGATGHPGIIPPHATLVFDVELLKPE

SEQ ID NO: 57 - protein, 158 aa, Artificial Sequence
  source: /note="Description of Artificial Sequence: Synthetic polypeptide"
ISLIAALAVDYVIGMENAMPWNLPADLAWFKRNTLNKPVIMGRHTWESIGRPLPGRKNIILSSQPSTDDRVTWVKSVDEAIAACGDVPEIMVIGGGRVIEQFLPKAQKLYLTHIDAEVEGDTHFPDYEPDDWESVFSEFHDADAQNSHSYCFEILERR

SEQ ID NO: 58 - protein, 245 aa, Artificial Sequence
  source: /note="Description of Artificial Sequence: Synthetic polypeptide"
SLALSLTADQMVSALLDAEPPILYSEYDPTRPFSEASMMGLLTNLADRELVHMINWAKRVPGFVDLALHDQVHLLECAWMEILMIGLVWRSMEHPGKLLFAPNLLLDRNQGKCVEGGVEIFDMLLATSSRFRMMNLQGEEFVCLKSIILLNSGVYTFLSSTLKSLEEKDHIHRVLDKITDTLIHLMAKAGLTLQQQHQRLAQLLLILSHIRHMSSKRMEHLYSMKCKNVVPLSDLLLEMLDAHRL

SEQ ID NO: 59 - protein, 610 aa, Artificial Sequence
  source: /note="Description of Artificial Sequence: Synthetic polypeptide"
MALPVTALLLPLALLLHAARPGVQVETISPGDGRTFPKRGQTCVVHYTGMLEDGKKVDSSRDRNKPFKFMLGKQEVIRGWEEGVAQMSVGQRAKLTISPDYAYGATGHPGIIPPHATLVFDVELLKPEYPYDVPDYAFPVDRTKREIVMTQSPATLSLSPGERATLSCRASQDISKYLNWYQQKPGQAPRLLIYHTSRLHSGIPARFSGSGSGTDYTLTISSLQPEDFAVYFCQQGNTLPYTFGQGTKLEIKGGGGSGGGGSGGGGSQVQLQESGPGLVKPSETLSLTCTVSGVSLPDYGVSWIRQPPGKGLEWIGVIWGSETTYYSSSLKSRVTISKDNSKNQVSLKLSSVTAADTAVYYCAKHYYYGGSYAMDYWGQGTLVTVSSTTTPAPRPPTPAPTIASQPLSLRPEACRPAAGGAVHTRGLDFACDIYIWAPLAGTCGVLLLSLVITLYCKRGRKKLLYIFKQPFMRPVQTTQEEDGCSCRFPEEEEGGCELRVKFSRSADAPAYKQGQNQLYNELNLGRREEYDVLDKRRGRDPEMGGKPRRKNPQEGLYNELQKDKMAEAYSEIGMKGERRRGKGHDGLYQGLSTATKDTYDALHMQALPPR

SEQ ID NO: 60 - DNA, 1830 bp, Artificial Sequence
  source: /note="Description of Artificial Sequence: Synthetic polynucleotide"
atggccctccctgtcaccgccctgctgcttccgctggctcttctgctccacgccgctcggcccggagtgcaggtggaaaccatctccccaggagacgggcgcaccttccccaagcgcggccagacctgtgtggtgcactacaccgggatgcttgaagatggaaagaaagtcgattcctcccgggacagaaacaagccctttaagtttatgctaggcaagcaggaggtgatccgaggctgggaagaaggggttgcccagatgagtgtgggtcagagagccaaactgactatatctccagattatgcctatggtgccactgggcacccaggcatcatcccaccacatgccactctcgtcttcgatgtggagcttctaaaaccggaatacccttatgatgttcctgattatgctttccccgtggatcgtactaaaagagaaattgtgatgacccagtcacccgccactcttagcctttcacccggtgagcgcgcaaccctgtcttgcagagcctcccaagacatctcaaaataccttaattggtatcaacagaagcccggacaggctcctcgccttctgatctaccacaccagccggctccattctggaatccctgccaggttcagcggtagcggatctgggaccgactacaccctcactatcagctcactgcagccagaggacttcgctgtctatttctgtcagcaagggaacaccctgccctacacctttggacagggcaccaagctcgagattaaaggtggaggtggcagcggaggaggtgggtccggcggtggaggaagccaggtccaactccaagaaagcggaccgggtcttgtgaagccatcagaaactctttcactgacttgtactgtgagcggagtgtctctccccgattacggggtgtcttggatcagacagccaccggggaagggtctggaatggattggagtgatttggggctctgagactacttactactcttcatccctcaagtcacgcgtcaccatctcaaaggacaactctaagaatcaggtgtcactgaaactgtcatctgtgaccgcagccgacaccgccgtgtactattgcgctaagcattactattatggcgggagctacgcaatggattactggggacagggtactctggtcaccgtgtccagcaccactaccccagcaccgaggccacccaccccggctcctaccatcgcctcccagcctctgtccctgcgtccggaggcatgtagacccgcagctggtggggccgtgcatacccggggtcttgacttcgcctgcgatatctacatttgggcccctctggctggtacttgcggggtcctgctgctttcactcgtgatcactctttactgtaagcgcggtcggaagaagctgctgtacatctttaagcaacccttcatgaggcctgtgcagactactcaagaggaggacggctgttcatgccggttcccagaggaggaggaaggcggctgcgaactgcgcgtgaaattcagccgcagcgcagatgctccagcctacaagcaggggcagaaccagctctacaacgaactcaatcttggtcggagagaggagtacgacgtgctggacaagcggagaggacgggacccagaaatgggcgggaagccgcgcagaaagaatccccaagagggcctgtacaacgagctccaaaaggataagatggcagaagcctatagcgagattggtatgaaaggggaacgcagaagaggcaaaggccacgacggactgtaccagggactcagcaccgccaccaaggacacctatgacgctcttcacatgcaggccctgccgcctcgg

SEQ ID NO: 61 - protein, 610 aa, Artificial Sequence
  source: /note="Description of Artificial Sequence: Synthetic polypeptide"
MALPVTALLLPLALLLHAARPGVQVETISPGDGRTFPKRGQTCVVHYTGMLEDGKKVDSSRDRNKPFKFMLGKQEVIRGWEEGVAQMSVGQRAKLTISPDYAYGATGHPGIIPPHATLVFDVELLKPEYPYDVPDYAFPVDATKREIVMTQSPATLSLSPGERATLSCRASQDISKYLNWYQQKPGQAPRLLIYHTSRLHSGIPARFSGSGSGTDYTLTISSLQPEDFAVYFCQQGNTLPYTFGQGTKLEIKGGGGSGGGGSGGGGSQVQLQESGPGLVKPSETLSLTCTVSGVSLPDYGVSWIRQPPGKGLEWIGVIWGSETTYYSSSLKSRVTISKDNSKNQVSLKLSSVTAADTAVYYCAKHYYYGGSYAMDYWGQGTLVTVSSTTTPAPRPPTPAPTIASQPLSLRPEACRPAAGGAVHTRGLDFACDIYIWAPLAGTCGVLLLSLVITLYCKRGRKKLLYIFKQPFMRPVQTTQEEDGCSCRFPEEEEGGCELRVKFSRSADAPAYKQGQNQLYNELNLGRREEYDVLDKRRGRDPEMGGKPRRKNPQEGLYNELQKDKMAEAYSEIGMKGERRRGKGHDGLYQGLSTATKDTYDALHMQALPPR

SEQ ID NO: 62 - DNA, 1830 bp, Artificial Sequence
  source: /note="Description of Artificial Sequence: Synthetic polynucleotide"
atggccctccctgtcaccgccctgctgcttccgctggctcttctgctccacgccgctcggcccggagtgcaggtggaaaccatctccccaggagacgggcgcaccttccccaagcgcggccagacctgtgtggtgcactacaccgggatgcttgaagatggaaagaaagtcgattcctcccgggacagaaacaagccctttaagtttatgctaggcaagcaggaggtgatccgaggctgggaagaaggggttgcccagatgagtgtgggtcagagagccaaactgactatatctccagattatgcctatggtgccactgggcacccaggcatcatcccaccacatgccactctcgtcttcgatgtggagcttctaaaaccggaatacccttatgatgttcctgattatgctttccccgtggatgctactaaaagagaaattgtgatgacccagtcacccgccactcttagcctttcacccggtgagcgcgcaaccctgtcttgcagagcctcccaagacatctcaaaataccttaattggtatcaacagaagcccggacaggctcctcgccttctgatctaccacaccagccggctccattctggaatccctgccaggttcagcggtagcggatctgggaccgactacaccctcactatcagctcactgcagccagaggacttcgctgtctatttctgtcagcaagggaacaccctgccctacacctttggacagggcaccaagctcgagattaaaggtggaggtggcagcggaggaggtgggtccggcggtggaggaagccaggtccaactccaagaaagcggaccgggtcttgtgaagccatcagaaactctttcactgacttgtactgtgagcggagtgtctctccccgattacggggtgtcttggatcagacagccaccggggaagggtctggaatggattggagtgatttggggctctgagactacttactactcttcatccctcaagtcacgcgtcaccatctcaaaggacaactctaagaatcaggtgtcactgaaactgtcatctgtgaccgcagccgacaccgccgtgtactattgcgctaagcattactattatggcgggagctacgcaatggattactggggacagggtactctggtcaccgtgtccagcaccactaccccagcaccgaggccacccaccccggctcctaccatcgcctcccagcctctgtccctgcgtccggaggcatgtagacccgcagctggtggggccgtgcatacccggggtcttgacttcgcctgcgatatctacatttgggcccctctggctggtacttgcggggtcctgctgctttcactcgtgatcactctttactgtaagcgcggtcggaagaagctgctgtacatctttaagcaacccttcatgaggcctgtgcagactactcaagaggaggacggctgttcatgccggttcccagaggaggaggaaggcggctgcgaactgcgcgtgaaattcagccgcagcgcagatgctccagcctacaagcaggggcagaaccagctctacaacgaactcaatcttggtcggagagaggagtacgacgtgctggacaagcggagaggacgggacccagaaatgggcgggaagccgcgcagaaagaatccccaagagggcctgtacaacgagctccaaaaggataagatggcagaagcctatagcgagattggtatgaaaggggaacgcagaagaggcaaaggccacgacggactgtaccagggactcagcaccgccaccaaggacacctatgacgctcttcacatgcaggccctgccgcctcgg

SEQ ID NO: 63 - protein, 661 aa, Artificial Sequence
  source: /note="Description of Artificial Sequence: Synthetic polypeptide"
MALPVTALLLPLALLLHAARPISLIAALAVDYVIGMENAMPWNLPADLAWFKRNTLNKPVIMGRHTWESIGRPLPGRKNIILSSQPSTDDRVTWVKSVDEAIAACGDVPEIMVIGGGRVIEQFLPKAQKLYLTHIDAEVEGDTHFPDYEPDDWESVFSEFHDADAQNSHSYCFEILERRYPYDVPDYAFPVDRTKREIVMTQSPATLSLSPGERATLSCRASQDISKYLNWYQQKPGQAPRLLIYHTSRLHSGIPARFSGSGSGTDYTLTISSLQPEDFAVYFCQQGNTLPYTFGQGTKLEIKGGGGSGGGGSGGGGSQVQLQESGPGLVKPSETLSLTCTVSGVSLPDYGVSWIRQPPGKGLEWIGVIWGSETTYYSSSLKSRVTISKDNSKNQVSLKLSSVTAADTAVYYCAKHYYYGGSYAMDYWGQGTLVTVSSTTTPAPRPPTPAPTIASQPLSLRPEACRPAAGGAVHTRGLDFACDIYIWAPLAGTCGVLLLSLVITLYCKRGRKKLLYIFKQPFMRPVQTTQEEDGCSCRFPEEEEGGCELRVKFSRSADAPAYKQGQNQLYNELNLGRREEYDVLDKRRGRDPEMGGKPRRKNPQEGLYNELQKDKMAEAYSEIGMKGERRRGKGHDGLYQGLSTATKDTYDALHMQALPPR

SEQ ID NO: 64 - DNA, 1983 bp, Artificial Sequence
  source: /note="Description of Artificial Sequence: Synthetic polynucleotide"
atggccctccctgtcaccgccctgctgcttccgctggctcttctgctccacgccgctcggcccatctctctgattgccgctctggccgtggactacgtgatcgggatggaaaacgctatgccatggaatctgcccgccgatctggcttggttcaagaggaacaccctgaacaagccagtgatcatgggcagacacacttgggagtccattggccggcccctgcctggacgcaagaacatcattctgagctcccagccctctaccgacgacagggtgacatgggtgaaaagtgtggacgaagccattgccgcttgcggagatgtgcccgagatcatggtcatcggcggagggagagtgatcgagcagttcctgcctaaggcccagaaactgtacctgactcacattgacgctgaggtggaaggggacacccattttcctgattatgagccagacgattgggaaagcgtgttctccgagtttcacgacgccgatgctcagaactctcatagttattgctttgagatcctggaaaggagatacccttatgatgttcctgattatgctttccccgtggatcgtactaaaagagaaattgtgatgacccagtcacccgccactcttagcctttcacccggtgagcgcgcaaccctgtcttgcagagcctcccaagacatctcaaaataccttaattggtatcaacagaagcccggacaggctcctcgccttctgatctaccacaccagccggctccattctggaatccctgccaggttcagcggtagcggatctgggaccgactacaccctcactatcagctcactgcagccagaggacttcgctgtctatttctgtcagcaagggaacaccctgccctacacctttggacagggcaccaagctcgagattaaaggtggaggtggcagcggaggaggtgggtccggcggtggaggaagccaggtccaactccaagaaagcggaccgggtcttgtgaagccatcagaaactctttcactgacttgtactgtgagcggagtgtctctccccgattacggggtgtcttggatcagacagccaccggggaagggtctggaatggattggagtgatttggggctctgagactacttactactcttcatccctcaagtcacgcgtcaccatctcaaaggacaactctaagaatcaggtgtcactgaaactgtcatctgtgaccgcagccgacaccgccgtgtactattgcgctaagcattactattatggcgggagctacgcaatggattactggggacagggtactctggtcaccgtgtccagcaccactaccccagcaccgaggccacccaccccggctcctaccatcgcctcccagcctctgtccctgcgtccggaggcatgtagacccgcagctggtggggccgtgcatacccggggtcttgacttcgcctgcgatatctacatttgggcccctctggctggtacttgcggggtcctgctgctttcactcgtgatcactctttactgtaagcgcggtcggaagaagctgctgtacatctttaagcaacccttcatgaggcctgtgcagactactcaagaggaggacggctgttcatgccggttcccagaggaggaggaaggcggctgcgaactgcgcgtgaaattcagccgcagcgcagatgctccagcctacaagcaggggcagaaccagctctacaacgaactcaatcttggtcggagagaggagtacgacgtgctggacaagcggagaggacgggacccagaaatgggcgggaagccgcgcagaaagaatccccaagagggcctgtacaacgagctccaaaaggataagatggcagaagcctatagcgagattggtatgaaaggggaacgcagaagaggcaaaggccacgacggactgtaccagggactcagcaccgccaccaaggacacctatgacgctcttcacatgcaggccctgccgcctcgg

SEQ ID NO: 65 - protein, 661 aa, Artificial Sequence
  source: /note="Description of Artificial Sequence: Synthetic polypeptide"
MALPVTALLLPLALLLHAARPISLIAALAVDYVIGMENAMPWNLPADLAWFKRNTLNKPVIMGRHTWESIGRPLPGRKNIILSSQPSTDDRVTWVKSVDEAIAACGDVPEIMVIGGGRVIEQFLPKAQKLYLTHIDAEVEGDTHFPDYEPDDWESVFSEFHDADAQNSHSYCFEILERRYPYDVPDYAFPVDATKREIVMTQSPATLSLSPGERATLSCRASQDISKYLNWYQQKPGQAPRLLIYHTSRLHSGIPARFSGSGSGTDYTLTISSLQPEDFAVYFCQQGNTLPYTFGQGTKLEIKGGGGSGGGGSGGGGSQVQLQESGPGLVKPSETLSLTCTVSGVSLPDYGVSWIRQPPGKGLEWIGVIWGSETTYYSSSLKSRVTISKDNSKNQVSLKLSSVTAADTAVYYCAKHYYYGGSYAMDYWGQGTLVTVSSTTTPAPRPPTPAPTIASQPLSLRPEACRPAAGGAVHTRGLDFACDIYIWAPLAGTCGVLLLSLVITLYCKRGRKKLLYIFKQPFMRPVQTTQEEDGCSCRFPEEEEGGCELRVKFSRSADAPAYKQGQNQLYNELNLGRREEYDVLDKRRGRDPEMGGKPRRKNPQEGLYNELQKDKMAEAYSEIGMKGERRRGKGHDGLYQGLSTATKDTYDALHMQALPPR

SEQ ID NO: 66 - DNA, 1983 bp, Artificial Sequence
  source: /note="Description of Artificial Sequence: Synthetic polynucleotide"
atggccctccctgtcaccgccctgctgcttccgctggctcttctgctccacgccgctcggcccatctctctgattgccgctctggccgtggactacgtgatcgggatggaaaacgctatgccatggaatctgcccgccgatctggcttggttcaagaggaacaccctgaacaagccagtgatcatgggcagacacacttgggagtccattggccggcccctgcctggacgcaagaacatcattctgagctcccagccctctaccgacgacagggtgacatgggtgaaaagtgtggacgaagccattgccgcttgcggagatgtgcccgagatcatggtcatcggcggagggagagtgatcgagcagttcctgcctaaggcccagaaactgtacctgactcacattgacgctgaggtggaaggggacacccattttcctgattatgagccagacgattgggaaagcgtgttctccgagtttcacgacgccgatgctcagaactctcatagttattgctttgagatcctggaaaggagatacccttatgatgttcctgattatgctttccccgtggatgctactaaaagagaaattgtgatgacccagtcacccgccactcttagcctttcacccggtgagcgcgcaaccctgtcttgcagagcctcccaagacatctcaaaataccttaattggtatcaacagaagcccggacaggctcctcgccttctgatctaccacaccagccggctccattctggaatccctgccaggttcagcggtagcggatctgggaccgactacaccctcactatcagctcactgcagccagaggacttcgctgtctatttctgtcagcaagggaacaccctgccctacacctttggacagggcaccaagctcgagattaaaggtggaggtggcagcggaggaggtgggtccggcggtggaggaagccaggtccaactccaagaaagcggaccgggtcttgtgaagccatcagaaactctttcactgacttgtactgtgagcggagtgtctctccccgattacggggtgtcttggatcagacagccaccggggaagggtctggaatggattggagtgatttggggctctgagactacttactactcttcatccctcaagtcacgcgtcaccatctcaaaggacaactctaagaatcaggtgtcactgaaactgtcatctgtgaccgcagccgacaccgccgtgtactattgcgctaagcattactattatggcgggagctacgcaatggattactggggacagggtactctggtcaccgtgtccagcaccactaccccagcaccgaggccacccaccccggctcctaccatcgcctcccagcctctgtccctgcgtccggaggcatgtagacccgcagctggtggggccgtgcatacccggggtcttgacttcgcctgcgatatctacatttgggcccctctggctggtacttgcggggtcctgctgctttcactcgtgatcactctttactgtaagcgcggtcggaagaagctgctgtacatctttaagcaacccttcatgaggcctgtgcagactactcaagaggaggacggctgttcatgccggttcccagaggaggaggaaggcggctgcgaactgcgcgtgaaattcagccgcagcgcagatgctccagcctacaagcaggggcagaaccagctctacaacgaactcaatcttggtcggagagaggagtacgacgtgctggacaagcggagaggacgggacccagaaatgggcgggaagccgcgcagaaagaatccccaagagggcctgtacaacgagctccaaaaggataagatggcagaagcctatagcgagattggtatgaaaggggaacgcagaagaggcaaaggccacgacggactgtaccagggactcagcaccgccaccaaggacacctatgacgctcttcacatgcaggccctgccgcctcgg

SEQ ID NO: 67 - protein, 750 aa, Artificial Sequence
  source: /note="Description of Artificial Sequence: Synthetic polypeptide"
MALPVTALLLPLALLLHAARPRSSLALSLTADQMVSALLDAEPPILYSEYDPTRPFSEASMMGLLTNLADRELVHMINWAKRVPGFVDLALHDQVHLLECAWMEILMIGLVWRSMEHPGKLLFAPNLLLDRNQGKCVEGGVEIFDMLLATSSRFRMMNLQGEEFVCLKSIILLNSGVYTFLSSTLKSLEEKDHIHRVLDKITDTLIHLMAKAGLTLQQQHQRLAQLLLILSHIRHMSSKRMEHLYSMKCKNVVPLSDLLLEMLDAHRLYPYDVPDYAFPVDRTKREIVMTQSPATLSLSPGERATLSCRASQDISKYLNWYQQKPGQAPRLLIYHTSRLHSGIPARFSGSGSGTDYTLTISSLQPEDFAVYFCQQGNTLPYTFGQGTKLEIKGGGGSGGGGSGGGGSQVQLQESGPGLVKPSETLSLTCTVSGVSLPDYGVSWIRQPPGKGLEWIGVIWGSETTYYSSSLKSRVTISKDNSKNQVSLKLSSVTAADTAVYYCAKHYYYGGSYAMDYWGQGTLVTVSSTTTPAPRPPTPAPTIASQPLSLRPEACRPAAGGAVHTRGLDFACDIYIWAPLAGTCGVLLLSLVITLYCKRGRKKLLYIFKQPFMRPVQTTQEEDGCSCRFPEEEEGGCELRVKFSRSADAPAYKQGQNQLYNELNLGRREEYDVLDKRRGRDPEMGGKPRRKNPQEGLYNELQKDKMAEAYSEIGMKGERRRGKGHDGLYQGLSTATKDTYDALHMQALPPR

SEQ ID NO: 68 - DNA, 2250 bp, Artificial Sequence
  source: /note="Description of Artificial Sequence: Synthetic polynucleotide"
atggccctccctgtcaccgccctgctgcttccgctggctcttctgctccacgccgctcggccccggtcgtcgttggcactttccctgactgccgaccagatggtgtccgcccttctggacgccgagcctccaattctgtactcggagtacgatccgactcgcccgttctccgaagccagcatgatgggcctgttgactaacctggcggaccgcgagttggtgcacatgattaactgggctaagcgggtgccgggcttcgtggacctggccctgcacgaccaagtgcacctcctggaatgcgcctggatggaaatcctcatgatcggcctcgtgtggagatccatggagcatcccggaaagctcctgtttgcacccaacctcctgcttgatcgcaaccagggaaaatgcgtggaagggggtgtcgagattttcgacatgctgctcgccacctcttcccggttccggatgatgaatctgcagggagaagagttcgtgtgtctgaagtcaatcatcctgctgaactccggggtctataccttcctgagctcgaccctcaagtcactggaggaaaaagaccacatccatcgcgtgctcgataagatcaccgacacccttatccatctcatggcgaaggctggactgaccctgcaacagcagcaccagaggctggcccagttgctgctgattctgagccacatccggcacatgtcgtccaagaggatggaacacctgtacagcatgaagtgcaagaacgtcgtgcctctgtccgatctgctcctggaaatgctggacgcgcacagactctacccttatgatgttcctgattatgctttccccgtggatcgtactaaaagagaaattgtgatgacccagtcacccgccactcttagcctttcacccggtgagcgcgcaaccctgtcttgcagagcctcccaagacatctcaaaataccttaattggtatcaacagaagcccggacaggctcctcgccttctgatctaccacaccagccggctccattctggaatccctgccaggttcagcggtagcggatctgggaccgactacaccctcactatcagctcactgcagccagaggacttcgctgtctatttctgtcagcaagggaacaccctgccctacacctttggacagggcaccaagctcgagattaaaggtggaggtggcagcggaggaggtgggtccggcggtggaggaagccaggtccaactccaagaaagcggaccgggtcttgtgaagccatcagaaactctttcactgacttgtactgtgagcggagtgtctctccccgattacggggtgtcttggatcagacagccaccggggaagggtctggaatggattggagtgatttggggctctgagactacttactactcttcatccctcaagtcacgcgtcaccatctcaaaggacaactctaagaatcaggtgtcactgaaactgtcatctgtgaccgcagccgacaccgccgtgtactattgcgctaagcattactattatggcgggagctacgcaatggattactggggacagggtactctggtcaccgtgtccagcaccactaccccagcaccgaggccacccaccccggctcctaccatcgcctcccagcctctgtccctgcgtccggaggcatgtagacccgcagctggtggggccgtgcatacccggggtcttgacttcgcctgcgatatctacatttgggcccctctggctggtacttgcggggtcctgctgctttcactcgtgatcactctttactgtaagcgcggtcggaagaagctgctgtacatctttaagcaacccttcatgaggcctgtgcagactactcaagaggaggacggctgttcatgccggttcccagaggaggaggaaggcggctgcgaactgcgcgtgaaattcagccgcagcgcagatgctccagcctacaagcaggggcagaaccagctctacaacgaactcaatcttggtcggagagaggagtacgacgtgctggacaagcggagaggacgggacccagaaatgggcgggaagccgcgcagaaagaatccccaagagggcctgtacaacgagctccaaaaggataagatggcagaagcctatagcgagattggtatgaaaggggaacgcagaagaggcaaaggccacgacggactgtaccagggactcagcaccgccaccaaggacacctatgacgctcttcacatgcaggccctgccgcctcgg

SEQ ID NO: 69 - protein, 750 aa, Artificial Sequence
  source: /note="Description of Artificial Sequence: Synthetic polypeptide"
MALPVTALLLPLALLLHAARPRSSLALSLTADQMVSALLDAEPPILYSEYDPTRPFSEASMMGLLTNLADRELVHMINWAKRVPGFVDLALHDQVHLLECAWMEILMIGLVWRSMEHPGKLLFAPNLLLDRNQGKCVEGGVEIFDMLLATSSRFRMMNLQGEEFVCLKSIILLNSGVYTFLSSTLKSLEEKDHIHRVLDKITDTLIHLMAKAGLTLQQQHQRLAQLLLILSHIRHMSSKRMEHLYSMKCKNVVPLSDLLLEMLDAHRLYPYDVPDYAFPVDATKREIVMTQSPATLSLSPGERATLSCRASQDISKYLNWYQQKPGQAPRLLIYHTSRLHSGIPARFSGSGSGTDYTLTISSLQPEDFAVYFCQQGNTLPYTFGQGTKLEIKGGGGSGGGGSGGGGSQVQLQESGPGLVKPSETLSLTCTVSGVSLPDYGVSWIRQPPGKGLEWIGVIWGSETTYYSSSLKSRVTISKDNSKNQVSLKLSSVTAADTAVYYCAKHYYYGGSYAMDYWGQGTLVTVSSTTTPAPRPPTPAPTIASQPLSLRPEACRPAAGGAVHTRGLDFACDIYIWAPLAGTCGVLLLSLVITLYCKRGRKKLLYIFKQPFMRPVQTTQEEDGCSCRFPEEEEGGCELRVKFSRSADAPAYKQGQNQLYNELNLGRREEYDVLDKRRGRDPEMGGKPRRKNPQEGLYNELQKDKMAEAYSEIGMKGERRRGKGHDGLYQGLSTATKDTYDALHMQALPPR

SEQ ID NO: 70 - DNA, 2250 bp, Artificial Sequence
  source: /note="Description of Artificial Sequence: Synthetic polynucleotide"
atggccctccctgtcaccgccctgctgcttccgctggctcttctgctccacgccgctcggccccggtcgtcgttggcactttccctgactgccgaccagatggtgtccgcccttctggacgccgagcctccaattctgtactcggagtacgatccgactcgcccgttctccgaagccagcatgatgggcctgttgactaacctggcggaccgcgagttggtgcacatgattaactgggctaagcgggtgccgggcttcgtggacctggccctgcacgaccaagtgcacctcctggaatgcgcctggatggaaatcctcatgatcggcctcgtgtggagatccatggagcatcccggaaagctcctgtttgcacccaacctcctgcttgatcgcaaccagggaaaatgcgtggaagggggtgtcgagattttcgacatgctgctcgccacctcttcccggttccggatgatgaatctgcagggagaagagttcgtgtgtctgaagtcaatcatcctgctgaactccggggtctataccttcctgagctcgaccctcaagtcactggaggaaaaagaccacatccatcgcgtgctcgataagatcaccgacacccttatccatctcatggcgaaggctggactgaccctgcaacagcagcaccagaggctggcccagttgctgctgattctgagccacatccggcacatgtcgtccaagaggatggaacacctgtacagcatgaagtgcaagaacgtcgtgcctctgtccgatctgctcctggaaatgctggacgcgcacagactctacccttatgatgttcctgattatgctttccccgtggatgctactaaaagagaaattgtgatgacccagtcacccgccactcttagcctttcacccggtgagcgcgcaaccctgtcttgcagagcctcccaagacatctcaaaataccttaattggtatcaacagaagcccggacaggctcctcgccttctgatctaccacaccagccggctccattctggaatccctgccaggttcagcggtagcggatctgggaccgactacaccctcactatcagctcactgcagccagaggacttcgctgtctatttctgtcagcaagggaacaccctgccctacacctttggacagggcaccaagctcgagattaaaggtggaggtggcagcggaggaggtgggtccggcggtggaggaagccaggtccaactccaagaaagcggaccgggtcttgtgaagccatcagaaactctttcactgacttgtactgtgagcggagtgtctctccccgattacggggtgtcttggatcagacagccaccggggaagggtctggaatggattggagtgatttggggctctgagactacttactactcttcatccctcaagtcacgcgtcaccatctcaaaggacaactctaagaatcaggtgtcactgaaactgtcatctgtgaccgcagccgacaccgccgtgtactattgcgctaagcattactattatggcgggagctacgcaatggattactggggacagggtactctggtcaccgtgtccagcaccactaccccagcaccgaggccacccaccccggctcctaccatcgcctcccagcctctgtccctgcgtccggaggcatgtagacccgcagctggtggggccgtgcatacccggggtcttgacttcgcctgcgatatctacatttgggcccctctggctggtacttgcggggtcctgctgctttcactcgtgatcactctttactgtaagcgcggtcggaagaagctgctgtacatctttaagcaacccttcatgaggcctgtgcagactactcaagaggaggacggctgttcatgccggttcccagaggaggaggaaggcggctgcgaactgcgcgtgaaattcagccgcagcgcagatgctccagcctacaagcaggggcagaaccagctctacaacgaactcaatcttggtcggagagaggagtacgacgtgctggacaagcggagaggacgggacccagaaatgggcgggaagccgcgcagaaagaatccccaagagggcctgtacaacgagctccaaaaggataagatggcagaagcctatagcgagattggtatgaaaggggaacgcagaagaggcaaaggccacgacggactgtaccagggactcagcaccgccaccaaggacacctatgacgctcttcacatgcaggccctgccgcctcgg

SEQ ID NO: 71 - protein, 606 aa, Artificial Sequence
  source: /note="Description of Artificial Sequence: Synthetic polypeptide"
MALPVTALLLPLALLLHAARPGVQVETISPGDGRTFPKRGQTCVVHYTGMLEDGKKVDSSRDRNKPFKFMLGKQEVIRGWEEGVAQMSVGQRAKLTISPDYAYGATGHPGIIPPHATLVFDVELLKPEYPYDVPDYAFPVDEIVMTQSPATLSLSPGERATLSCRASQDISKYLNWYQQKPGQAPRLLIYHTSRLHSGIPARFSGSGSGTDYTLTISSLQPEDFAVYFCQQGNTLPYTFGQGTKLEIKGGGGSGGGGSGGGGSQVQLQESGPGLVKPSETLSLTCTVSGVSLPDYGVSWIRQPPGKGLEWIGVIWGSETTYYSSSLKSRVTISKDNSKNQVSLKLSSVTAADTAVYYCAKHYYYGGSYAMDYWGQGTLVTVSSTTTPAPRPPTPAPTIASQPLSLRPEACRPAAGGAVHTRGLDFACDIYIWAPLAGTCGVLLLSLVITLYCKRGRKKLLYIFKQPFMRPVQTTQEEDGCSCRFPEEEEGGCELRVKFSRSADAPAYKQGQNQLYNELNLGRREEYDVLDKRRGRDPEMGGKPRRKNPQEGLYNELQKDKMAEAYSEIGMKGERRRGKGHDGLYQGLSTATKDTYDALHMQALPPR

SEQ ID NO: 72 - DNA, 1818 bp, Artificial Sequence
  source: /note="Description of Artificial Sequence: Synthetic polynucleotide"
atggccctccctgtcaccgccctgctgcttccgctggctcttctgctccacgccgctcggcccggagtgcaggtggaaaccatctccccaggagacgggcgcaccttccccaagcgcggccagacctgtgtggtgcactacaccgggatgcttgaagatggaaagaaagtcgattcctcccgggacagaaacaagccctttaagtttatgctaggcaagcaggaggtgatccgaggctgggaagaaggggttgcccagatgagtgtgggtcagagagccaaactgactatatctccagattatgcctatggtgccactgggcacccaggcatcatcccaccacatgccactctcgtcttcgatgtggagcttctaaaaccggaatacccttatgatgttcctgattatgctttccccgtggatgaaattgtgatgacccagtcacccgccactcttagcctttcacccggtgagcgcgcaaccctgtcttgcagagcctcccaagacatctcaaaataccttaattggtatcaacagaagcccggacaggctcctcgccttctgatctaccacaccagccggctccattctggaatccctgccaggttcagcggtagcggatctgggaccgactacaccctcactatcagctcactgcagccagaggacttcgctgtctatttctgtcagcaagggaacaccctgccctacacctttggacagggcaccaagctcgagattaaaggtggaggtggcagcggaggaggtgggtccggcggtggaggaagccaggtccaactccaagaaagcggaccgggtcttgtgaagccatcagaaactctttcactgacttgtactgtgagcggagtgtctctccccgattacggggtgtcttggatcagacagccaccggggaagggtctggaatggattggagtgatttggggctctgagactacttactactcttcatccctcaagtcacgcgtcaccatctcaaaggacaactctaagaatcaggtgtcactgaaactgtcatctgtgaccgcagccgacaccgccgtgtactattgcgctaagcattactattatggcgggagctacgcaatggattactggggacagggtactctggtcaccgtgtccagcaccactaccccagcaccgaggccacccaccccggctcctaccatcgcctcccagcctctgtccctgcgtccggaggcatgtagacccgcagctggtggggccgtgcatacccggggtcttgacttcgcctgcgatatctacatttgggcccctctggctggtacttgcggggtcctgctgctttcactcgtgatcactctttactgtaagcgcggtcggaagaagctgctgtacatctttaagcaacccttcatgaggcctgtgcagactactcaagaggaggacggctgttcatgccggttcccagaggaggaggaaggcggctgcgaactgcgcgtgaaattcagccgcagcgcagatgctccagcctacaagcaggggcagaaccagctctacaacgaactcaatcttggtcggagagaggagtacgacgtgctggacaagcggagaggacgggacccagaaatgggcgggaagccgcgcagaaagaatccccaagagggcctgtacaacgagctccaaaaggataagatggcagaagcctatagcgagattggtatgaaaggggaacgcagaagaggcaaaggccacgacggactgtaccagggactcagcaccgccaccaaggacacctatgacgctcttcacatgcaggccctgccgcctcgg

SEQ ID NO: 73 - protein, 746 aa, Artificial Sequence
  source: /note="Description of Artificial Sequence: Synthetic polypeptide"
MALPVTALLLPLALLLHAARPRSSLALSLTADQMVSALLDAEPPILYSEYDPTRPFSEASMMGLLTNLADRELVHMINWAKRVPGFVDLALHDQVHLLECAWMEILMIGLVWRSMEHPGKLLFAPNLLLDRNQGKCVEGGVEIFDMLLATSSRFRMMNLQGEEFVCLKSIILLNSGVYTFLSSTLKSLEEKDHIHRVLDKITDTLIHLMAKAGLTLQQQHQRLAQLLLILSHIRHMSSKRMEHLYSMKCKNVVPLSDLLLEMLDAHRLYPYDVPDYAFPVDEIVMTQSPATLSLSPGERATLSCRASQDISKYLNWYQQKPGQAPRLLIYHTSRLHSGIPARFSGSGSGTDYTLTISSLQPEDFAVYFCQQGNTLPYTFGQGTKLEIKGGGGSGGGGSGGGGSQVQLQESGPGLVKPSETLSLTCTVSGVSLPDYGVSWIRQPPGKGLEWIGVIWGSETTYYSSSLKSRVTISKDNSKNQVSLKLSSVTAADTAVYYCAKHYYYGGSYAMDYWGQGTLVTVSSTTTPAPRPPTPAPTIASQPLSLRPEACRPAAGGAVHTRGLDFACDIYIWAPLAGTCGVLLLSLVITLYCKRGRKKLLYIFKQPFMRPVQTTQEEDGCSCRFPEEEEGGCELRVKFSRSADAPAYKQGQNQLYNELNLGRREEYDVLDKRRGRDPEMGGKPRRKNPQEGLYNELQKDKMAEAYSEIGMKGERRRGKGHDGLYQGLSTATKDTYDALHMQALPPR

SEQ ID NO: 74 - DNA, 2238 bp, Artificial Sequence
  source: /note="Description of Artificial Sequence: Synthetic polynucleotide"
atggccctccctgtcaccgccctgctgcttccgctggctcttctgctccacgccgctcggccccggtcgtcgttggcactttccctgactgccgaccagatggtgtccgcccttctggacgccgagcctccaattctgtactcggagtacgatccgactcgcccgttctccgaagccagcatgatgggcctgttgactaacctggcggaccgcgagttggtgcacatgattaactgggctaagcgggtgccgggcttcgtggacctggccctgcacgaccaagtgcacctcctggaatgcgcctggatggaaatcctcatgatcggcctcgtgtggagatccatggagcatcccggaaagctcctgtttgcacccaacctcctgcttgatcgcaaccagggaaaatgcgtggaagggggtgtcgagattttcgacatgctgctcgccacctcttcccggttccggatgatgaatctgcagggagaagagttcgtgtgtctgaagtcaatcatcctgctgaactccggggtctataccttcctgagctcgaccctcaagtcactggaggaaaaagaccacatccatcgcgtgctcgataagatcaccgacacccttatccatctcatggcgaaggctggactgaccctgcaacagcagcaccagaggctggcccagttgctgctgattctgagccacatccggcacatgtcgtccaagaggatggaacacctgtacagcatgaagtgcaagaacgtcgtgcctctgtccgatctgctcctggaaatgctggacgcgcacagactctacccttatgatgttcctgattatgctttccccgtggatgaaattgtgatgacccagtcacccgccactcttagcctttcacccggtgagcgcgcaaccctgtcttgcagagcctcccaagacatctcaaaataccttaattggtatcaacagaagcccggacaggctcctcgccttctgatctaccacaccagccggctccattctggaatccctgccaggttcagcggtagcggatctgggaccgactacaccctcactatcagctcactgcagccagaggacttcgctgtctatttctgtcagcaagggaacaccctgccctacacctttggacagggcaccaagctcgagattaaaggtggaggtggcagcggaggaggtgggtccggcggtggaggaagccaggtccaactccaagaaagcggaccgggtcttgtgaagccatcagaaactctttcactgacttgtactgtgagcggagtgtctctccccgattacggggtgtcttggatcagacagccaccggggaagggtctggaatggattggagtgatttggggctctgagactacttactactcttcatccctcaagtcacgcgtcaccatctcaaaggacaactctaagaatcaggtgtcactgaaactgtcatctgtgaccgcagccgacaccgccgtgtactattgcgctaagcattactattatggcgggagctacgcaatggattactggggacagggtactctggtcaccgtgtccagcaccactaccccagcaccgaggccacccaccccggctcctaccatcgcctcccagcctctgtccctgcgtccggaggcatgtagacccgcagctggtggggccgtgcatacccggggtcttgacttcgcctgcgatatctacatttgggcccctctggctggtacttgcggggtcctgctgctttcactcgtgatcactctttactgtaagcgcggtcggaagaagctgctgtacatctttaagcaacccttcatgaggcctgtgcagactactcaagaggaggacggctgttcatgccggttcccagaggaggaggaaggcggctgcgaactgcgcgtgaaattcagccgcagcgcagatgctccagcctacaagcaggggcagaaccagctctacaacgaactcaatcttggtcggagagaggagtacgacgtgctggacaagcggagaggacgggacccagaaatgggcgggaagccgcgcagaaagaatccccaagagggcctgtacaacgagctccaaaaggataagatggcagaagcctatagcgagattggtatgaaaggggaacgcagaagaggcaaaggccacgacggactgtaccagggactcagcaccgccaccaaggacacctatgacgctcttcacatgcaggccctgccgcctcgg

SEQ ID NO: 75 - protein, 737 aa, Artificial Sequence
  source: /note="Description of Artificial Sequence: Synthetic polypeptide"
MALPVTALLLPLALLLHAARPRSSLALSLTADQMVSALLDAEPPILYSEYDPTRPFSEASMMGLLTNLADRELVHMINWAKRVPGFVDLALHDQVHLLECAWMEILMIGLVWRSMEHPGKLLFAPNLLLDRNQGKCVEGGVEIFDMLLATSSRFRMMNLQGEEFVCLKSIILLNSGVYTFLSSTLKSLEEKDHIHRVLDKITDTLIHLMAKAGLTLQQQHQRLAQLLLILSHIRHMSSKRMEHLYSMKCKNVVPLSDLLLEMLDAHRLRTKREIVMTQSPATLSLSPGERATLSCRASQDISKYLNWYQQKPGQAPRLLIYHTSRLHSGIPARFSGSGSGTDYTLTISSLQPEDFAVYFCQQGNTLPYTFGQGTKLEIKGGGGSGGGGSGGGGSQVQLQESGPGLVKPSETLSLTCTVSGVSLPDYGVSWIRQPPGKGLEWIGVIWGSETTYYSSSLKSRVTISKDNSKNQVSLKLSSVTAADTAVYYCAKHYYYGGSYAMDYWGQGTLVTVSSTTTPAPRPPTPAPTIASQPLSLRPEACRPAAGGAVHTRGLDFACDIYIWAPLAGTCGVLLLSLVITLYCKRGRKKLLYIFKQPFMRPVQTTQEEDGCSCRFPEEEEGGCELRVKFSRSADAPAYKQGQNQLYNELNLGRREEYDVLDKRRGRDPEMGGKPRRKNPQEGLYNELQKDKMAEAYSEIGMKGERRRGKGHDGLYQGLSTATKDTYDALHMQALPPR

SEQ ID NO: 76 - DNA, 2211 bp, Artificial Sequence
  source: /note="Description of Artificial Sequence: Synthetic polynucleotide"
atggccctccctgtcaccgccctgctgcttccgctggctcttctgctccacgccgctcggccccggtcgtcgttggcactttccctgactgccgaccagatggtgtccgcccttctggacgccgagcctccaattctgtactcggagtacgatccgactcgcccgttctccgaagccagcatgatgggcctgttgactaacctggcggaccgcgagttggtgcacatgattaactgggctaagcgggtgccgggcttcgtggacctggccctgcacgaccaagtgcacctcctggaatgcgcctggatggaaatcctcatgatcggcctcgtgtggagatccatggagcatcccggaaagctcctgtttgcacccaacctcctgcttgatcgcaaccagggaaaatgcgtggaagggggtgtcgagattttcgacatgctgctcgccacctcttcccggttccggatgatgaatctgcagggagaagagttcgtgtgtctgaagtcaatcatcctgctgaactccggggtctataccttcctgagctcgaccctcaagtcactggaggaaaaagaccacatccatcgcgtgctcgataagatcaccgacacccttatccatctcatggcgaaggctggactgaccctgcaacagcagcaccagaggctggcccagttgctgctgattctgagccacatccggcacatgtcgtccaagaggatggaacacctgtacagcatgaagtgcaagaacgtcgtgcctctgtccgatctgctcctggaaatgctggacgcgcacagactccgtactaaaagagaaattgtgatgacccagtcacccgccactcttagcctttcacccggtgagcgcgcaaccctgtcttgcagagcctcccaagacatctcaaaataccttaattggtatcaacagaagcccggacaggctcctcgccttctgatctaccacaccagccggctccattctggaatccctgccaggttcagcggtagcggatctgggaccgactacaccctcactatcagctcactgcagccagaggacttcgctgtctatttctgtcagcaagggaacaccctgccctacacctttggacagggcaccaagctcgagattaaaggtggaggtggcagcggaggaggtgggtccggcggtggaggaagccaggtccaactccaagaaagcggaccgggtcttgtgaagccatcagaaactctttcactgacttgtactgtgagcggagtgtctctccccgattacggggtgtcttggatcagacagccaccggggaagggtctggaatggattggagtgatttggggctctgagactacttactactcttcatccctcaagtcacgcgtcaccatctcaaaggacaactctaagaatcaggtgtcactgaaactgtcatctgtgaccgcagccgacaccgccgtgtactattgcgctaagcattactattatggcgggagctacgcaatggattactggggacagggtactctggtcaccgtgtccagcaccactaccccagcaccgaggccacccaccccggctcctaccatcgcctcccagcctctgtccctgcgtccggaggcatgtagacccgcagctggtggggccgtgcatacccggggtcttgacttcgcctgcgatatctacatttgggcccctctggctggtacttgcggggtcctgctgctttcactcgtgatcactctttactgtaagcgcggtcggaagaagctgctgtacatctttaagcaacccttcatgaggcctgtgcagactactcaagaggaggacggctgttcatgccggttcccagaggaggaggaaggcggctgcgaactgcgcgtgaaattcagccgcagcgcagatgctccagcctacaagcaggggcagaaccagctctacaacgaactcaatcttggtcggagagaggagtacgacgtgctggacaagcggagaggacgggacccagaaatgggcgggaagccgcgcagaaagaatccccaagagggcctgtacaacgagctccaaaaggataagatggcagaagcctatagcgagattggtatgaaaggggaacgcagaagaggcaaaggccacgacggactgtaccagggactcagcaccgccaccaaggacacctatgacgctcttcacatgcaggccctgccgcctcgg

SEQ ID NO: 77 - protein, 733 aa, Artificial Sequence
  source: /note="Description of Artificial Sequence: Synthetic polypeptide"
MALPVTALLLPLALLLHAARPRSSLALSLTADQMVSALLDAEPPILYSEYDPTRPFSEASMMGLLTNLADRELVHMINWAKRVPGFVDLALHDQVHLLECAWMEILMIGLVWRSMEHPGKLLFAPNLLLDRNQGKCVEGGVEIFDMLLATSSRFRMMNLQGEEFVCLKSIILLNSGVYTFLSSTLKSLEEKDHIHRVLDKITDTLIHLMAKAGLTLQQQHQRLAQLLLILSHIRHMSSKRMEHLYSMKCKNVVPLSDLLLEMLDAHRLEIVMTQSPATLSLSPGERATLSCRASQDISKYLNWYQQKPGQAPRLLIYHTSRLHSGIPARFSGSGSGTDYTLTISSLQPEDFAVYFCQQGNTLPYTFGQGTKLEIKGGGGSGGGGSGGGGSQVQLQESGPGLVKPSETLSLTCTVSGVSLPDYGVSWIRQPPGKGLEWIGVIWGSETTYYSSSLKSRVTISKDNSKNQVSLKLSSVTAADTAVYYCAKHYYYGGSYAMDYWGQGTLVTVSSTTTPAPRPPTPAPTIASQPLSLRPEACRPAAGGAVHTRGLDFACDIYIWAPLAGTCGVLLLSLVITLYCKRGRKKLLYIFKQPFMRPVQTTQEEDGCSCRFPEEEEGGCELRVKFSRSADAPAYKQGQNQLYNELNLGRREEYDVLDKRRGRDPEMGGKPRRKNPQEGLYNELQKDKMAEAYSEIGMKGERRRGKGHDGLYQGLSTATKDTYDALHMQALPPR

SEQ ID NO: 78 - DNA, 2199 bp, Artificial Sequence
  source: /note="Description of Artificial Sequence: Synthetic polynucleotide"
atggccctccctgtcaccgccctgctgcttccgctggctcttctgctccacgccgctcggccccggtcgtcgttggcactttccctgactgccgaccagatggtgtccgcccttctggacgccgagcctccaattctgtactcggagtacgatccgactcgcccgttctccgaagccagcatgatgggcctgttgactaacctggcggaccgcgagttggtgcacatgattaactgggctaagcgggtgccgggcttcgtggacctggccctgcacgaccaagtgcacctcctggaatgcgcctggatggaaatcctcatgatcggcctcgtgtggagatccatggagcatcccggaaagctcctgtttgcacccaacctcctgcttgatcgcaaccagggaaaatgcgtggaagggggtgtcgagattttcgacatgctgctcgccacctcttcccggttccggatgatgaatctgcagggagaagagttcgtgtgtctgaagtcaatcatcctgctgaactccggggtctataccttcctgagctcgaccctcaagtcactggaggaaaaagaccacatccatcgcgtgctcgataagatcaccgacacccttatccatctcatggcgaaggctggactgaccctgcaacagcagcaccagaggctggcccagttgctgctgattctgagccacatccggcacatgtcgtccaagaggatggaacacctgtacagcatgaagtgcaagaacgtcgtgcctctgtccgatctgctcctggaaatgctggacgcgcacagactcgaaattgtgatgacccagtcacccgccactcttagcctttcacccggtgagcgcgcaaccctgtcttgcagagcctcccaagacatctcaaaataccttaattggtatcaacagaagcccggacaggctcctcgccttctgatctaccacaccagccggctccattctggaatccctgccaggttcagcggtagcggatctgggaccgactacaccctcactatcagctcactgcagccagaggacttcgctgtctatttctgtcagcaagggaacaccctgccctacacctttggacagggcaccaagctcgagattaaaggtggaggtggcagcggaggaggtgggtccggcggtggaggaagccaggtccaactccaagaaagcggaccgggtcttgtgaagccatcagaaactctttcactgacttgtactgtgagcggagtgtctctccccgattacggggtgtcttggatcagacagccaccggggaagggtctggaatggattggagtgatttggggctctgagactacttactactcttcatccctcaagtcacgcgtcaccatctcaaaggacaactctaagaatcaggtgtcactgaaactgtcatctgtgaccgcagccgacaccgccgtgtactattgcgctaagcattactattatggcgggagctacgcaatggattactggggacagggtactctggtcaccgtgtccagcaccactaccccagcaccgaggccacccaccccggctcctaccatcgcctcccagcctctgtccctgcgtccggaggcatgtagacccgcagctggtggggccgtgcatacccggggtcttgacttcgcctgcgatatctacatttgggcccctctggctggtacttgcggggtcctgctgctttcactcgtgatcactctttactgtaagcgcggtcggaagaagctgctgtacatctttaagcaacccttcatgaggcctgtgcagactactcaagaggaggacggctgttcatgccggttcccagaggaggaggaaggcggctgcgaactgcgcgtgaaattcagccgcagcgcagatgctccagcctacaagcaggggcagaaccagctctacaacgaactcaatcttggtcggagagaggagtacgacgtgctggacaagcggagaggacgggacccagaaatgggcgggaagccgcgcagaaagaatccccaagagggcctgtacaacgagctccaaaaggataagatggcagaagcctatagcgagattggtatgaaaggggaacgcagaagaggcaaaggccacgacggactgtaccagggactcagcaccgccaccaaggacacctatgacgctcttcacatgcaggccctgccgcctcgg

SEQ ID NO: 79-81 - skipped (3 entries)

SEQ ID NO: 82 - DNA, 5000 bp, Artificial Sequence; identical to SEQ ID NO: 32
  source: /note="Description of Artificial Sequence: Synthetic polynucleotide"
  misc_feature (1)..(5000): /note="This sequence may encompass 100-5000 nucleotides"
  source: /note="See specification as filed for detailed description of substitutions and preferred embodiments"

SEQ ID NO: 83-102 - skipped (20 entries)

SEQ ID NO: 103 - protein, 747 aa, Artificial Sequence
  source: /note="Description of Artificial Sequence: Synthetic polypeptide"
MALPVTALLLPLALLLHAARPRSSLALSLTADQMVSALLDAEPPILYSEYDPTRPFSEASMMGLLTNLADRELVHMINWAKRVPGFVDLALHDQVHLLECAWMEILMIGLVWRSMEHPGKLLFAPNLLLDRNQGKCVEGGVEIFDMLLATSSRFRMMNLQGEEFVCLKSIILLNSGVYTFLSSTLKSLEEKDHIHRVLDKITDTLIHLMAKAGLTLQQQHQRLAQLLLILSHIRHMSSKRMEHLYSMKCKNVVPLSDLLLEMLDAHRLSLNLTESHNSRKKREIVMTQSPATLSLSPGERATLSCRASQDISKYLNWYQQKPGQAPRLLIYHTSRLHSGIPARFSGSGSGTDYTLTISSLQPEDFAVYFCQQGNTLPYTFGQGTKLEIKGGGGSGGGGSGGGGSQVQLQESGPGLVKPSETLSLTCTVSGVSLPDYGVSWIRQPPGKGLEWIGVIWGSETTYYSSSLKSRVTISKDNSKNQVSLKLSSVTAADTAVYYCAKHYYYGGSYAMDYWGQGTLVTVSSTTTPAPRPPTPAPTIASQPLSLRPEACRPAAGGAVHTRGLDFACDIYIWAPLAGTCGVLLLSLVITLYCKRGRKKLLYIFKQPFMRPVQTTQEEDGCSCRFPEEEEGGCELRVKFSRSADAPAYKQGQNQLYNELNLGRREEYDVLDKRRGRDPEMGGKPRRKNPQEGLYNELQKDKMAEAYSEIGMKGERRRGKGHDGLYQGLSTATKDTYDALHMQALPPR

SEQ ID NO: 104 - DNA, 2241 bp, Artificial Sequence
  source: /note="Description of Artificial Sequence: Synthetic polynucleotide"
atggccctccctgtcaccgccctgctgcttccgctggctcttctgctccacgccgctcggccccggtcgtcgttggcactttccctgactgccgaccagatggtgtccgcccttctggacgccgagcctccaattctgtactcggagtacgatccgactcgcccgttctccgaagccagcatgatgggcctgttgactaacctggcggaccgcgagttggtgcacatgattaactgggctaagcgggtgccgggcttcgtggacctggccctgcacgaccaagtgcacctcctggaatgcgcctggatggaaatcctcatgatcggcctcgtgtggagatccatggagcatcccggaaagctcctgtttgcacccaacctcctgcttgatcgcaaccagggaaaatgcgtggaagggggtgtcgagattttcgacatgctgctcgccacctcttcccggttccggatgatgaatctgcagggagaagagttcgtgtgtctgaagtcaatcatcctgctgaactccggggtctataccttcctgagctcgaccctcaagtcactggaggaaaaagaccacatccatcgcgtgctcgataagatcaccgacacccttatccatctcatggcgaaggctggactgaccctgcaacagcagcaccagaggctggcccagttgctgctgattctgagccacatccggcacatgtcgtccaagaggatggaacacctgtacagcatgaagtgcaagaacgtcgtgcctctgtccgatctgctcctggaaatgctggacgcgcacagactcagtctcaatttgactgagtcacacaattccaggaagaaaagggaaattgtgatgacccagtcacccgccactcttagcctttcacccggtgagcgcgcaaccctgtcttgcagagcctcccaagacatctcaaaataccttaattggtatcaacagaagcccggacaggctcctcgccttctgatctaccacaccagccggctccattctggaatccctgccaggttcagcggtagcggatctgggaccgactacaccctcactatcagctcactgcagccagaggacttcgctgtctatttctgtcagcaagggaacaccctgccctacacctttggacagggcaccaagctcgagattaaaggtggaggtggcagcggaggaggtgggtccggcggtggaggaagccaggtccaactccaagaaagcggaccgggtcttgtgaagccatcagaaactctttcactgacttgtactgtgagcggagtgtctctccccgattacggggtgtcttggatcagacagccaccggggaagggtctggaatggattggagtgatttggggctctgagactacttactactcttcatccctcaagtcacgcgtcaccatctcaaaggacaactctaagaatcaggtgtcactgaaactgtcatctgtgaccgcagccgacaccgccgtgtactattgcgctaagcattactattatggcgggagctacgcaatggattactggggacagggtactctggtcaccgtgtccagcaccactaccccagcaccgaggccacccaccccggctcctaccatcgcctcccagcctctgtccctgcgtccggaggcatgtagacccgcagctggtggggccgtgcatacccggggtcttgacttcgcctgcgatatctacatttgggcccctctggctggtacttgcggggtcctgctgctttcactcgtgatcactctttactgtaagcgcggtcggaagaagctgctgtacatctttaagcaacccttcatgaggcctgtgcagactactcaagaggaggacggctgttcatgccggttcccagaggaggaggaaggcggctgcgaactgcgcgtgaaattcagccgcagcgcagatgctccagcctacaagcaggggcagaaccagctctacaacgaactcaatcttggtcggagagaggagtacgacgtgctggacaagcggagaggacgggacccagaaatgggcgggaagccgcgcagaaagaatccccaagagggcctgtacaacgagctccaaaaggataagatggcagaagcctatagcgagattggtatgaaaggggaacgcagaagaggcaaaggccacgacggactgtaccagggactcagcaccgccaccaaggacacctatgacgctcttcacatgcaggccctgccgcctcgg

SEQ ID NO: 105 - protein, 747 aa, Artificial Sequence
  source: /note="Description of Artificial Sequence: Synthetic polypeptide"
MALPVTALLLPLALLLHAARPRSSLALSLTADQMVSALLDAEPPILYSEYDPTRPFSEASMMGLLTNLADRELVHMINWAKRVPGFVDLALHDQVHLLECAWMEILMIGLVWRSMEHPGKLLFAPNLLLDRNQGKCVEGGVEIFDMLLATSSRFRMMNLQGEEFVCLKSIILLNSGVYTFLSSTLKSLEEKDHIHRVLDKITDTLIHLMAKAGLTLQQQHQRLAQLLLILSHIRHMSSKRMEHLYSMKCKNVVPLSDLLLEMLDAHRLGTGAEDPRPSRKRREIVMTQSPATLSLSPGERATLSCRASQDISKYLNWYQQKPGQAPRLLIYHTSRLHSGIPARFSGSGSGTDYTLTISSLQPEDFAVYFCQQGNTLPYTFGQGTKLEIKGGGGSGGGGSGGGGSQVQLQESGPGLVKPSETLSLTCTVSGVSLPDYGVSWIRQPPGKGLEWIGVIWGSETTYYSSSLKSRVTISKDNSKNQVSLKLSSVTAADTAVYYCAKHYYYGGSYAMDYWGQGTLVTVSSTTTPAPRPPTPAPTIASQPLSLRPEACRPAAGGAVHTRGLDFACDIYIWAPLAGTCGVLLLSLVITLYCKRGRKKLLYIFKQPFMRPVQTTQEEDGCSCRFPEEEEGGCELRVKFSRSADAPAYKQGQNQLYNELNLGRREEYDVLDKRRGRDPEMGGKPRRKNPQEGLYNELQKDKMAEAYSEIGMKGERRRGKGHDGLYQGLSTATKDTYDALHMQALPPR

SEQ ID NO: 106 - DNA, 2241 bp, Artificial Sequence
  source: /note="Description of Artificial Sequence: Synthetic polynucleotide"
atggccctccctgtcaccgccctgctgcttccgctggctcttctgctccacgccgctcggccccggtcgtcgttggcactttccctgactgccgaccagatggtgtccgcccttctggacgccgagcctccaattctgtactcggagtacgatccgactcgcccgttctccgaagccagcatgatgggcctgttgactaacctggcggaccgcgagttggtgcacatgattaactgggctaagcgggtgccgggcttcgtggacctggccctgcacgaccaagtgcacctcctggaatgcgcctggatggaaatcctcatgatcggcctcgtgtggagatccatggagcatcccggaaagctcctgtttgcacccaacctcctgcttgatcgcaaccagggaaaatgcgtggaagggggtgtcgagattttcgacatgctgctcgccacctcttcccggttccggatgatgaatctgcagggagaagagttcgtgtgtctgaagtcaatcatcctgctgaactccggggtctataccttcctgagctcgaccctcaagtcactggaggaaaaagaccacatccatcgcgtgctcgataagatcaccgacacccttatccatctcatggcgaaggctggactgaccctgcaacagcagcaccagaggctggcccagttgctgctgattctgagccacatccggcacatgtcgtccaagaggatggaacacctgtacagcatgaagtgcaagaacgtcgtgcctctgtccgatctgctcctggaaatgctggacgcgcacagactcgggacgggagctgaggatccacgacccagcagaaagcgacgggaaattgtgatgacccagtcacccgccactcttagcctttcacccggtgagcgcgcaaccctgtcttgcagagcctcccaagacatctcaaaataccttaattggtatcaacagaagcccggacaggctcctcgccttctgatctaccacaccagccggctccattctggaatccctgccaggttcagcggtagcggatctgggaccgactacaccctcactatcagctcactgcagccagaggacttcgctgtctatttctgtcagcaagggaacaccctgccctacacctttggacagggcaccaagctcgagattaaaggtggaggtggcagcggaggaggtgggtccggcggtggaggaagccaggtccaactccaagaaagcggaccgggtcttgtgaagccatcagaaactctttcactgacttgtactgtgagcggagtgtctctccccgattacggggtgtcttggatcagacagccaccggggaagggtctggaatggattggagtgatttggggctctgagactacttactactcttcatccctcaagtcacgcgtcaccatctcaaaggacaactctaagaatcaggtgtcactgaaactgtcatctgtgaccgcagccgacaccgccgtgtactattgcgctaagcattactattatggcgggagctacgcaatggattactggggacagggtactctggtcaccgtgtccagcaccactaccccagcaccgaggccacccaccccggctcctaccatcgcctcccagcctctgtccctgcgtccggaggcatgtagacccgcagctggtggggccgtgcatacccggggtcttgacttcgcctgcgatatctacatttgggcccctctggctggtacttgcggggtcctgctgctttcactcgtgatcactctttactgtaagcgcggtcggaagaagctgctgtacatctttaagcaacccttcatgaggcctgtgcagactactcaagaggaggacggctgttcatgccggttcccagaggaggaggaaggcggctgcgaactgcgcgtgaaattcagccgcagcgcagatgctccagcctacaagcaggggcagaaccagctctacaacgaactcaatcttggtcggagagaggagtacgacgtgctggacaagcggagaggacgggacccagaaatgggcgggaagccgcgcagaaagaatccccaagagggcctgtacaacgagctccaaaaggataagatggcagaagcctatagcgagattggtatgaaaggggaacgcagaagaggcaaaggccacgacggactgtaccagggactcagcaccgccaccaaggacacctatgacgctcttcacatgcaggccctgccgcctcgg

SEQ ID NO: 107 - protein, 747 aa, Artificial Sequence
  source: /note="Description of Artificial Sequence: Synthetic polypeptide"
MALPVTALLLPLALLLHAARPRSSLALSLTADQMVSALLDAEPPILYSEYDPTRPFSEASMMGLLTNLADRELVHMINWAKRVPGFVDLALHDQVHLLECAWMEILMIGLVWRSMEHPGKLLFAPNLLLDRNQGKCVEGGVEIFDMLLATSSRFRMMNLQGEEFVCLKSIILLNSGVYTFLSSTLKSLEEKDHIHRVLDKITDTLIHLMAKAGLTLQQQHQRLAQLLLILSHIRHMSSKRMEHLYSMKCKNVVPLSDLLLEMLDAHRLCKINGYPKRGRKRREIVMTQSPATLSLSPGERATLSCRASQDISKYLNWYQQKPGQAPRLLIYHTSRLHSGIPARFSGSGSGTDYTLTISSLQPEDFAVYFCQQGNTLPYTFGQGTKLEIKGGGGSGGGGSGGGGSQVQLQESGPGLVKPSETLSLTCTVSGVSLPDYGVSWIRQPPGKGLEWIGVIWGSETTYYSSSLKSRVTISKDNSKNQVSLKLSSVTAADTAVYYCAKHYYYGGSYAMDYWGQGTLVTVSSTTTPAPRPPTPAPTIASQPLSLRPEACRPAAGGAVHTRGLDFACDIYIWAPLAGTCGVLLLSLVITLYCKRGRKKLLYIFKQPFMRPVQTTQEEDGCSCRFPEEEEGGCELRVKFSRSADAPAYKQGQNQLYNELNLGRREEYDVLDKRRGRDPEMGGKPRRKNPQEGLYNELQKDKMAEAYSEIGMKGERRRGKGHDGLYQGLSTATKDTYDALHMQALPPR

SEQ ID NO: 108 - DNA, 2241 bp, Artificial Sequence
  source: /note="Description of Artificial Sequence: Synthetic polynucleotide"
atggccctccctgtcaccgccctgctgcttccgctggctcttctgctccacgccgctcggccccggtcgtcgttggcactttccctgactgccgaccagatggtgtccgcccttctggacgccgagcctccaattctgtactcggagtacgatccgactcgcccgttctccgaagccagcatgatgggcctgttgactaacctggcggaccgcgagttggtgcacatgattaactgggctaagcgggtgccgggcttcgtggacctggccctgcacgaccaagtgcacctcctggaatgcgcctggatggaaatcctcatgatcggcctcgtgtggagatccatggagcatcccggaaagctcctgtttgcacccaacctcctgcttgatcgcaaccagggaaaatgcgtggaagggggtgtcgagattttcgacatgctgctcgccacctcttcccggttccggatgatgaatctgcagggagaagagttcgtgtgtctgaagtcaatcatcctgctgaactccggggtctataccttcctgagctcgaccctcaagtcactggaggaaaaagaccacatccatcgcgtgctcgataagatcaccgacacccttatccatctcatggcgaaggctggactgaccctgcaacagcagcaccagaggctggcccagttgctgctgattctgagccacatccggcacatgtcgtccaagaggatggaacacctgtacagcatgaagtgcaagaacgtcgtgcctctgtccgatctgctcctggaaatgctggacgcgcacagactctgcaagatcaacggctaccctaagaggggcagaaagcggcgggaaattgtgatgacccagtcacccgccactcttagcctttcacccggtgagcgcgcaaccctgtcttgcagagcctcccaagacatctcaaaataccttaattggtatcaacagaagcccggacaggctcctcgccttctgatctaccacaccagccggctccattctggaatccctgccaggttcagcggtagcggatctgggaccgactacaccctcactatcagctcactgcagccagaggacttcgctgtctatttctgtcagcaagggaacaccctgccctacacctttggacagggcaccaagctcgagattaaaggtggaggtggcagcggaggaggtgggtccggcggtggaggaagccaggtccaactccaagaaagcggaccgggtcttgtgaagccatcagaaactctttcactgacttgtactgtgagcggagtgtctctccccgattacggggtgtcttggatcagacagccaccggggaagggtctggaatggattggagtgatttggggctctgagactacttactactcttcatccctcaagtcacgcgtcaccatctcaaaggacaactctaagaatcaggtgtcactgaaactgtcatctgtgaccgcagccgacaccgccgtgtactattgcgctaagcattactattatggcgggagctacgcaatggattactggggacagggtactctggtcaccgtgtccagcaccactaccccagcaccgaggccacccaccccggctcctaccatcgcctcccagcctctgtccctgcgtccggaggcatgtagacccgcagctggtggggccgtgcatacccggggtcttgacttcgcctgcgatatctacatttgggcccctctggctggtacttgcggggtcctgctgctttcactcgtgatcactctttactgtaagcgcggtcggaagaagctgctgtacatctttaagcaacccttcatgaggcctgtgcagactactcaagaggaggacggctgttcatgccggttcccagaggaggaggaaggcggctgcgaactgcgcgtgaaattcagccgcagcgcagatgctccagcctacaagcaggggcagaaccagctctacaacgaactcaatcttggtcggagagaggagtacgacgtgctggacaagcggagaggacgggacccagaaatgggcgggaagccgcgcagaaagaatccccaagagggcctgtacaacgagctccaaaaggataagatggcagaagcctatagcgagattggtatgaaaggggaacgcagaagaggcaaaggccacgacggactgtaccagggactcagcaccgccaccaaggacacctatgacgctcttcacatgcaggccctgccgcctcgg

SEQ ID NO: 109 - protein, 748 aa, Artificial Sequence
  source: /note="Description of Artificial Sequence: Synthetic polypeptide"
MALPVTALLLPLALLLHAARPRSSLALSLTADQMVSALLDAEPPILYSEYDPTRPFSEASMMGLLTNLADRELVHMINWAKRVPGFVDLALHDQVHLLECAWMEILMIGLVWRSMEHPGKLLFAPNLLLDRNQGKCVEGGVEIFDMLLATSSRFRMMNLQGEEFVCLKSIILLNSGVYTFLSSTLKSLEEKDHIHRVLDKITDTLIHLMAKAGLTLQQQHQRLAQLLLILSHIRHMSSKRMEHLYSMKCKNVVPLSDLLLEMLDAHRLLQWLEQQVAKRRTKREIVMTQSPATLSLSPGERATLSCRASQDISKYLNWYQQKPGQAPRLLIYHTSRLHSGIPARFSGSGSGTDYTLTISSLQPEDFAVYFCQQGNTLPYTFGQGTKLEIKGGGGSGGGGSGGGGSQVQLQESGPGLVKPSETLSLTCTVSGVSLPDYGVSWIRQPPGKGLEWIGVIWGSETTYYSSSLKSRVTISKDNSKNQVSLKLSSVTAADTAVYYCAKHYYYGGSYAMDYWGQGTLVTVSSTTTPAPRPPTPAPTIASQPLSLRPEACRPAAGGAVHTRGLDFACDIYIWAPLAGTCGVLLLSLVITLYCKRGRKKLLYIFKQPFMRPVQTTQEEDGCSCRFPEEEEGGCELRVKFSRSADAPAYKQGQNQLYNELNLGRREEYDVLDKRRGRDPEMGGKPRRKNPQEGLYNELQKDKMAEAYSEIGMKGERRRGKGHDGLYQGLSTATKDTYDALHMQALPPR

SEQ ID NO: 110 - DNA, 2244 bp, Artificial Sequence
  source: /note="Description of Artificial Sequence: Synthetic polynucleotide"
atggccctccctgtcaccgccctgctgcttccgctggctcttctgctccacgccgctcggccccggtcgtcgttggcactttccctgactgccgaccagatggtgtccgcccttctggacgccgagcctccaattctgtactcggagtacgatccgactcgcccgttctccgaagccagcatgatgggcctgttgactaacctggcggaccgcgagttggtgcacatgattaactgggctaagcgggtgccgggcttcgtggacctggccctgcacgaccaagtgcacctcctggaatgcgcctggatggaaatcctcatgatcggcctcgtgtggagatccatggagcatcccggaaagctcctgtttgcacccaacctcctgcttgatcgcaaccagggaaaatgcgtggaagggggtgtcgagattttcgacatgctgctcgccacctcttcccggttccggatgatgaatctgcagggagaagagttcgtgtgtctgaagtcaatcatcctgctgaactccggggtctataccttcctgagctcgaccctcaagtcactggaggaaaaagaccacatccatcgcgtgctcgataagatcaccgacacccttatccatctcatggcgaaggctggactgaccctgcaacagcagcaccagaggctggcccagttgctgctgattctgagccacatccggcacatgtcgtccaagaggatggaacacctgtacagcatgaagtgcaagaacgtcgtgcctctgtccgatctgctcctggaaatgctggacgcgcacagactcctgcaatggctggagcagcaggtggcgaagcggagaactaagcgggaaattgtgatgacccagtcacccgccactcttagcctttcacccggtgagcgcgcaaccctgtcttgcagagcctcccaagacatctcaaaataccttaattggtatcaacagaagcccggacaggctcctcgccttctgatctaccacaccagccggctccattctggaatccctgccaggttcagcggtagcggatctgggaccgactacaccctcactatcagctcactgcagccagaggacttcgctgtctatttctgtcagcaagggaacaccctgccctacacctttggacagggcaccaagctcgagattaaaggtggaggtggcagcggaggaggtgggtccggcggtggaggaagccaggtccaactccaagaaagcggaccgggtcttgtgaagccatcagaaactctttcactgacttgtactgtgagcggagtgtctctccccgattacggggtgtcttggatcagacagccaccggggaagggtctggaatggattggagtgatttggggctctgagactacttactactcttcatccctcaagtcacgcgtcaccatctcaaaggacaactctaagaatcaggtgtcactgaaactgtcatctgtgaccgcagccgacaccgccgtgtactattgcgctaagcattactattatggcgggagctacgcaatggattactggggacagggtactctggtcaccgtgtccagcaccactaccccagcaccgaggccacccaccccggctcctaccatcgcctcccagcctctgtccctgcgtccggaggcatgtagacccgcagctggtggggccgtgcatacccggggtcttgacttcgcctgcgatatctacatttgggcccctctggctggtacttgcggggtcctgctgctttcactcgtgatcactctttactgtaagcgcggtcggaagaagctgctgtacatctttaagcaacccttcatgaggcctgtgcagactactcaagaggaggacggctgttcatgccggttcccagaggaggaggaaggcggctgcgaactgcgcgtgaaattcagccgcagcgcagatgctccagcctacaagcaggggcagaaccagctctacaacgaactcaatcttggtcggagagaggagtacgacgtgctggacaagcggagaggacgggacccagaaatgggcgggaagccgcgcagaaagaatccccaagagggcctgtacaacgagctccaaaaggataagatggcagaagcctatagcgagattggtatgaaaggggaacgcagaagaggcaaaggccacgacggactgtaccagggactcagcaccgccaccaaggacacctatgacgctcttcacatgcaggccctgccgcctcgg

SEQ ID NO: 111 - protein, 753 aa, Artificial Sequence
  source: /note="Description of Artificial Sequence: Synthetic polypeptide"
MALPVTALLLPLALLLHAARPRSSLALSLTADQMVSALLDAEPPILYSEYDPTRPFSEASMMGLLTNLADRELVHMINWAKRVPGFVDLALHDQVHLLECAWMEILMIGLVWRSMEHPGKLLFAPNLLLDRNQGKCVEGGVEIFDMLLATSSRFRMMNLQGEEFVCLKSIILLNSGVYTFLSSTLKSLEEKDHIHRVLDKITDTLIHLMAKAGLTLQQQHQRLAQLLLILSHIRHMSSKRMEHLYSMKCKNVVPLSDLLLEMLDAHRLGTGAEDPRPSRKRRSLGDVGEIVMTQSPATLSLSPGERATLSCRASQDISKYLNWYQQKPGQAPRLLIYHTSRLHSGIPARFSGSGSGTDYTLTISSLQPEDFAVYFCQQGNTLPYTFGQGTKLEIKGGGGSGGGGSGGGGSQVQLQESGPGLVKPSETLSLTCTVSGVSLPDYGVSWIRQPPGKGLEWIGVIWGSETTYYSSSLKSRVTISKDNSKNQVSLKLSSVTAADTAVYYCAKHYYYGGSYAMDYWGQGTLVTVSSTTTPAPRPPTPAPTIASQPLSLRPEACRPAAGGAVHTRGLDFACDIYIWAPLAGTCGVLLLSLVITLYCKRGRKKLLYIFKQPFMRPVQTTQEEDGCSCRFPEEEEGGCELRVKFSRSADAPAYKQGQNQLYNELNLGRREEYDVLDKRRGRDPEMGGKPRRKNPQEGLYNELQKDKMAEAYSEIGMKGERRRGKGHDGLYQGLSTATKDTYDALHMQALPPR

SEQ ID NO: 112 - DNA, 2259 bp, Artificial Sequence
  source: /note="Description of Artificial Sequence: Synthetic polynucleotide"
atggccctccctgtcaccgccctgctgcttccgctggctcttctgctccacgccgctcggccccggtcgtcgttggcactttccctgactgccgaccagatggtgtccgcccttctggacgccgagcctccaattctgtactcggagtacgatccgactcgcccgttctccgaagccagcatgatgggcctgttgactaacctggcggaccgcgagttggtgcacatgattaactgggctaagcgggtgccgggcttcgtggacctggccctgcacgaccaagtgcacctcctggaatgcgcctggatggaaatcctcatgatcggcctcgtgtggagatccatggagcatcccggaaagctcctgtttgcacccaacctcctgcttgatcgcaaccagggaaaatgcgtggaagggggtgtcgagattttcgacatgctgctcgccacctcttcccggttccggatgatgaatctgcagggagaagagttcgtgtgtctgaagtcaatcatcctgctgaactccggggtctataccttcctgagctcgaccctcaagtcactggaggaaaaagaccacatccatcgcgtgctcgataagatcaccgacacccttatccatctcatggcgaaggctggactgaccctgcaacagcagcaccagaggctggcccagttgctgctgattctgagccacatccggcacatgtcgtccaagaggatggaacacctgtacagcatgaagtgcaagaacgtcgtgcctctgtccgatctgctcctggaaatgctggacgcgcacagactcggaaccggcgcggaagacccccggccctccaggaagcgaaggtccctcggagacgtgggtgaaattgtgatgacccagtcacccgccactcttagcctttcacccggtgagcgcgcaaccctgtcttgcagagcctcccaagacatctcaaaataccttaattggtatcaacagaagcccggacaggctcctcgccttctgatctaccacaccagccggctccattctggaatccctgccaggttcagcggtagcggatctgggaccgactacaccctcactatcagctcactgcagccagaggacttcgctgtctatttctgtcagcaagggaacaccctgccctacacctttggacagggcaccaagctcgagattaaaggtggaggtggcagcggaggaggtgggtccggcggtggaggaagccaggtccaactccaagaaagcggaccgggtcttgtgaagccatcagaaactctttcactgacttgtactgtgagcggagtgtctctccccgattacggggtgtcttggatcagacagccaccggggaagggtctggaatggattggagtgatttggggctctgagactacttactactcttcatccctcaagtcacgcgtcaccatctcaaaggacaactctaagaatcaggtgtcactgaaactgtcatctgtgaccgcagccgacaccgccgtgtactattgcgctaagcattactattatggcgggagctacgcaatggattactggggacagggtactctggtcaccgtgtccagcaccactaccccagcaccgaggccacccaccccggctcctaccatcgcctcccagcctctgtccctgcgtccggaggcatgtagacccgcagctggtggggccgtgcatacccggggtcttgacttcgcctgcgatatctacatttgggcccctctggctggtacttgcggggtcctgctgctttcactcgtgatcactctttactgtaagcgcggtcggaagaagctgctgtacatctttaagcaacccttcatgaggcctgtgcagactactcaagaggaggacggctgttcatgccggttcccagaggaggaggaaggcggctgcgaactgcgcgtgaaattcagccgcagcgcagatgctccagcctacaagcaggggcagaaccagctctacaacgaactcaatcttggtcggagagaggagtacgacgtgctggacaagcggagaggacgggacccagaaatgggcgggaagccgcgcagaaagaatccccaagagggcctgtacaacgagctccaaaaggataagatggcagaagcctatagcgagattggtatgaaaggggaacgcagaagaggcaaaggccacgacggactgtaccagggactcagcaccgccaccaaggacacctatgacgctcttcacatgcaggccctgccgcctcgg

SEQ ID NO: 113 - protein, 751 aa, Artificial Sequence
  source: /note="Description of Artificial Sequence: Synthetic polypeptide"
MALPVTALLLPLALLLHAARPRSSLALSLTADQMVSALLDAEPPILYSEYDPTRPFSEASMMGLLTNLADRELVHMINWAKRVPGFVDLALHDQVHLLECAWMEILMIGLVWRSMEHPGKLLFAPNLLLDRNQGKCVEGGVEIFDMLLATSSRFRMMNLQGEEFVCLKSIILLNSGVYTFLSSTLKSLEEKDHIHRVLDKITDTLIHLMAKAGLTLQQQHQRLAQLLLILSHIRHMSSKRMEHLYSMKCKNVVPLSDLLLEMLDAHRLGTGAEDPRPSRKRRSLGGEIVMTQSPATLSLSPGERATLSCRASQDISKYLNWYQQKPGQAPRLLIYHTSRLHSGIPARFSGSGSGTDYTLTISSLQPEDFAVYFCQQGNTLPYTFGQGTKLEIKGGGGSGGGGSGGGGSQVQLQESGPGLVKPSETLSLTCTVSGVSLPDYGVSWIRQPPGKGLEWIGVIWGSETTYYSSSLKSRVTISKDNSKNQVSLKLSSVTAADTAVYYCAKHYYYGGSYAMDYWGQGTLVTVSSTTTPAPRPPTPAPTIASQPLSLRPEACRPAAGGAVHTRGLDFACDIYIWAPLAGTCGVLLLSLVITLYCKRGRKKLLYIFKQPFMRPVQTTQEEDGCSCRFPEEEEGGCELRVKFSRSADAPAYKQGQNQLYNELNLGRREEYDVLDKRRGRDPEMGGKPRRKNPQEGLYNELQKDKMAEAYSEIGMKGERRRGKGHDGLYQGLSTATKDTYDALHMQALPPR

SEQ ID NO: 114 - DNA, 2253 bp, Artificial Sequence
  source: /note="Description of Artificial Sequence: Synthetic polynucleotide"
atggccctccctgtcaccgccctgctgcttccgctggctcttctgctccacgccgctcggccccggtcgtcgttggcactttccctgactgccgaccagatggtgtccgcccttctggacgccgagcctccaattctgtactcggagtacgatccgactcgcccgttctccgaagccagcatgatgggcctgttgactaacctggcggaccgcgagttggtgcacatgattaactgggctaagcgggtgccgggcttcgtggacctggccctgcacgaccaagtgcacctcctggaatgcgcctggatggaaatcctcatgatcggcctcgtgtggagatccatggagcatcccggaaagctcctgtttgcacccaacctcctgcttgatcgcaaccagggaaaatgcgtggaagggggtgtcgagattttcgacatgctgctcgccacctcttcccggttccggatgatgaatctgcagggagaagagttcgtgtgtctgaagtcaatcatcctgctgaactccggggtctataccttcctgagctcgaccctcaagtcactggaggaaaaagaccacatccatcgcgtgctcgataagatcaccgacacccttatccatctcatggcgaaggctggactgaccctgcaacagcagcaccagaggctggcccagttgctgctgattctgagccacatccggcacatgtcgtccaagaggatggaacacctgtacagcatgaagtgcaagaacgtcgtgcctctgtccgatctgctcctggaaatgctggacgcgcacagactcggcacaggtgccgaggaccctcggccaagccgcaaaaggaggtcacttggcggcgaaattgtgatgacccagtcacccgccactcttagcctttcacccggtgagcgcgcaaccctgtcttgcagagcctcccaagacatctcaaaataccttaattggtatcaacagaagcccggacaggctcctcgccttctgatctaccacaccagccggctccattctggaatccctgccaggttcagcggtagcggatctgggaccgactacaccctcactatcagctcactgcagccagaggacttcgctgtctatttctgtcagcaagggaacaccctgccctacacctttggacagggcaccaagctcgagattaaaggtggaggtggcagcggaggaggtgggtccggcggtggaggaagccaggtccaactccaagaaagcggaccgggtcttgtgaagccatcagaaactctttcactgacttgtactgtgagcggagtgtctctccccgattacggggtgtcttggatcagacagccaccggggaagggtctggaatggattggagtgatttggggctctgagactacttactactcttcatccctcaagtcacgcgtcaccatctcaaaggacaactctaagaatcaggtgtcactgaaactgtcatctgtgaccgcagccgacaccgccgtgtactattgcgctaagcattactattatggcgggagctacgcaatggattactggggacagggtactctggtcaccgtgtccagcaccactaccccagcaccgaggccacccaccccggctcctaccatcgcctcccagcctctgtccctgcgtccggaggcatgtagacccgcagctggtggggccgtgcatacccggggtcttgacttcgcctgcgatatctacatttgggcccctctggctggtacttgcggggtcctgctgctttcactcgtgatcactctttactgtaagcgcggtcggaagaagctgctgtacatctttaagcaacccttcatgaggcctgtgcagactactcaagaggaggacggctgttcatgccggttcccagaggaggaggaaggcggctgcgaactgcgcgtgaaattcagccgcagcgcagatgctccagcctacaagcaggggcagaaccagctctacaacgaactcaatcttggtcggagagaggagtacgacgtgctggacaagcggagaggacgggacccagaaatgggcgggaagccgcgcagaaagaatccccaagagggcctgtacaacgagctccaaaaggataagatggcagaagcctatagcgagattggtatgaaaggggaacgcagaagaggcaaaggccacgacggactgtaccagggactcagcaccgccaccaaggacacctatgacgctcttcacatgcaggccctgccgcctcgg

SEQ ID NO: 115 - protein, 750 aa, Artificial Sequence
  source: /note="Description of Artificial Sequence: Synthetic polypeptide"
MALPVTALLLPLALLLHAARPRSSLALSLTADQMVSALLDAEPPILYSEYDPTRPFSEASMMGLLTNLADRELVHMINWAKRVPGFVDLALHDQVHLLECAWMEILMIGLVWRSMEHPGKLLFAPNLLLDRNQGKCVEGGVEIFDMLLATSSRFRMMNLQGEEFVCLKSIILLNSGVYTFLSSTLKSLEEKDHIHRVLDKITDTLIHLMAKAGLTLQQQHQRLAQLLLILSHIRHMSSKRMEHLYSMKCKNVVPLSDLLLEMLDAHRLGTGAEDPRPSRKRRSLGEIVMTQSPATLSLSPGERATLSCRASQDISKYLNWYQQKPGQAPRLLIYHTSRLHSGIPARFSGSGSGTDYTLTISSLQPEDFAVYFCQQGNTLPYTFGQGTKLEIKGGGGSGGGGSGGGGSQVQLQESGPGLVKPSETLSLTCTVSGVSLPDYGVSWIRQPPGKGLEWIGVIWGSETTYYSSSLKSRVTISKDNSKNQVSLKLSSVTAADTAVYYCAKHYYYGGSYAMDYWGQGTLVTVSSTTTPAPRPPTPAPTIASQPLSLRPEACRPAAGGAVHTRGLDFACDIYIWAPLAGTCGVLLLSLVITLYCKRGRKKLLYIFKQPFMRPVQTTQEEDGCSCRFPEEEEGGCELRVKFSRSADAPAYKQGQNQLYNELNLGRREEYDVLDKRRGRDPEMGGKPRRKNPQEGLYNELQKDKMAEAYSEIGMKGERRRGKGHDGLYQGLSTATKDTYDALHMQALPPR

SEQ ID NO: 116 - DNA, 2250 bp, Artificial Sequence
  source: /note="Description of Artificial Sequence: Synthetic polynucleotide"
atggccctccctgtcaccgccctgctgcttccgctggctcttctgctccacgccgctcggccccggtcgtcgttggcactttccctgactgccgaccagatggtgtccgcccttctggacgccgagcctccaattctgtactcggagtacgatccgactcgcccgttctccgaagccagcatgatgggcctgttgactaacctggcggaccgcgagttggtgcacatgattaactgggctaagcgggtgccgggcttcgtggacctggccctgcacgaccaagtgcacctcctggaatgcgcctggatggaaatcctcatgatcggcctcgtgtggagatccatggagcatcccggaaagctcctgtttgcacccaacctcctgcttgatcgcaaccagggaaaatgcgtggaagggggtgtcgagattttcgacatgctgctcgccacctcttcccggttccggatgatgaatctgcagggagaagagttcgtgtgtctgaagtcaatcatcctgctgaactccggggtctataccttcctgagctcgaccctcaagtcactggaggaaaaagaccacatccatcgcgtgctcgataagatcaccgacacccttatccatctcatggcgaaggctggactgaccctgcaacagcagcaccagaggctggcccagttgctgctgattctgagccacatccggcacatgtcgtccaagaggatggaacacctgtacagcatgaagtgcaagaacgtcgtgcctctgtccgatctgctcctggaaatgctggacgcgcacagactcggaaccggagcagaagatcccagaccaagccggaaaaggcggtccctgggtgaaattgtgatgacccagtcacccgccactcttagcctttcacccggtgagcgcgcaaccctgtcttgcagagcctcccaagacatctcaaaataccttaattggtatcaacagaagcccggacaggctcctcgccttctgatctaccacaccagccggctccattctggaatccctgccaggttcagcggtagcggatctgggaccgactacaccctcactatcagctcactgcagccagaggacttcgctgtctatttctgtcagcaagggaacaccctgccctacacctttggacagggcaccaagctcgagattaaaggtggaggtggcagcggaggaggtgggtccggcggtggaggaagccaggtccaactccaagaaagcggaccgggtcttgtgaagccatcagaaactctttcactgacttgtactgtgagcggagtgtctctccccgattacggggtgtcttggatcagacagccaccggggaagggtctggaatggattggagtgatttggggctctgagactacttactactcttcatccctcaagtcacgcgtcaccatctcaaaggacaactctaagaatcaggtgtcactgaaactgtcatctgtgaccgcagccgacaccgccgtgtactattgcgctaagcattactattatggcgggagctacgcaatggattactggggacagggtactctggtcaccgtgtccagcaccactaccccagcaccgaggccacccaccccggctcctaccatcgcctcccagcctctgtccctgcgtccggaggcatgtagacccgcagctggtggggccgtgcatacccggggtcttgacttcgcctgcgatatctacatttgggcccctctggctggtacttgcggggtcctgctgctttcactcgtgatcactctttactgtaagcgcggtcggaagaagctgctgtacatctttaagcaacccttcatgaggcctgtgcagactactcaagaggaggacggctgttcatgccggttcccagaggaggaggaaggcggctgcgaactgcgcgtgaaattcagccgcagcgcagatgctccagcctacaagcaggggcagaaccagctctacaacgaactcaatcttggtcggagagaggagtacgacgtgctggacaagcggagaggacgggacccagaaatgggcgggaagccgcgcagaaagaatccccaagagggcctgtacaacgagctccaaaaggataagatggcagaagcctatagcgagattggtatgaaaggggaacgcagaagaggcaaaggccacgacggactgtaccagggactcagcaccgccaccaaggacacctatgacgctcttcacatgcaggccctgccgcctcgg

SEQ ID NO: 117 - skipped

SEQ ID NO: 118 - DNA, 126 bp, Artificial Sequence
  source: /note="Description of Artificial Sequence: Synthetic polynucleotide"
aagcgcggtcggaagaagctgctgtacatctttaagcaacccttcatgaggcctgtgcagactactcaagaggaggacggctgttcatgccggttcccagaggaggaggaaggcggctgcgaactg

SEQ ID NO: 119 - DNA, 336 bp, Artificial Sequence
  source: /note="Description of Artificial Sequence: Synthetic polynucleotide"
cgcgtgaaattcagccgcagcgcagatgctccagcctacaagcaggggcagaaccagctctacaacgaactcaatcttggtcggagagaggagtacgacgtgctggacaagcggagaggacgggacccagaaatgggcgggaagccgcgcagaaagaatccccaagagggcctgtacaacgagctccaaaaggataagatggcagaagcctatagcgagattggtatgaaaggggaacgcagaagaggcaaaggccacgacggactgtaccagggactcagcaccgccaccaaggacacctatgacgctcttcacatgcaggccctgccgcctcgg

SEQ ID NO: 120 - protein, 35 aa, Artificial Sequence
  source: /note="Description of Artificial Sequence: Synthetic polypeptide"
TKKKYSSSVHDPNGEYMFMRAVNTAKKSRLTDVTL

SEQ ID NO: 121 - protein, 245 aa, Artificial Sequence
  source: /note="Description of Artificial Sequence: Synthetic polypeptide"
SLALSLTADQMVSALLDAEPPILYSEYDPTRPFSEASMMGLLTNLADRELVHMINWAKRVPGFVDLTLHDQVHLLECAWMEILMIGLVWRSMEHPGKLLFAPNLLLDRNQGKCVEGGVEIFDMLLATSSRFRMMNLQGEEFVCLKSIILLNSGVYTFLSSTLKSLEEKDHIHRVLDKITDTLIHLMAKAGLTLQQQHQRLAQLLLILSHIRHMSNKRMEHLYSMKCKNVVPLSDLLLEMLDAHRL

SEQ ID NO: 122 - DNA, 735 bp, Artificial Sequence
  source: /note="Description of Artificial Sequence: Synthetic polynucleotide"
tcgttggcactttccctgactgccgaccagatggtgtccgcccttctggacgccgagcctccaattctgtactcggagtacgatccgactcgcccgttctccgaagccagcatgatgggcctgttgactaacctggcggaccgcgagttggtgcacatgattaactgggctaagcgggtgccgggcttcgtggacctgaccctgcacgaccaagtgcacctcctggaatgcgcctggatggaaatcctcatgatcggcctcgtgtggagatccatggagcatcccggaaagctcctgtttgcacccaacctcctgcttgatcgcaaccagggaaaatgcgtggaagggggtgtcgagattttcgacatgctgctcgccacctcttcccggttccggatgatgaatctgcagggagaagagttcgtgtgtctgaagtcaatcatcctgctgaactccggggtctataccttcctgagctcgaccctcaagtcactggaggaaaaagaccacatccatcgcgtgctcgataagatcaccgacacccttatccatctcatggcgaaggctggactgaccctgcaacagcagcaccagaggctggcccagttgctgctgattctgagccacatccggcacatgtcgaacaagaggatggaacacctgtacagcatgaagtgcaagaacgtcgtgcctctgtccgatctgctcctggaaatgctggacgcgcacagactc

SEQ ID NO: 123 - protein, 4 aa, Artificial Sequence
  source: /note="Description of Artificial Sequence: Synthetic peptide"
RTKR

SEQ ID NO: 124 - protein, 41 aa, Artificial Sequence
  source: /note="Description of Artificial Sequence: Synthetic polypeptide"
RSKRSRLLHSDYMNMTPRRPGPTRKHYQPYAPPRDFAAYRS

SEQ ID NO: 125 - protein, 20 aa, Artificial Sequence
  source: /note="Description of Artificial Sequence: Synthetic peptide"
GTGAEDPRPSRKRRSLGDVG

SEQ ID NO: 126 - DNA, 60 bp, Artificial Sequence
  source: /note="Description of Artificial Sequence: Synthetic oligonucleotide"
ggaaccggcgcggaagacccccggccctccaggaagcgaaggtccctcggagacgtgggt

SEQ ID NO: 127 - protein, 14 aa, Artificial Sequence
  source: /note="Description of Artificial Sequence: Synthetic peptide"
GTGAEDPRPSRKRR

SEQ ID NO: 128 - DNA, 42 bp, Artificial Sequence
  source: /note="Description of Artificial Sequence: Synthetic oligonucleotide"
ggaaccggcgcggaagacccccggccctccaggaagcgaagg

SEQ ID NO: 129 - protein, 15 aa, Artificial Sequence
  source: /note="Description of Artificial Sequence: Synthetic peptide"
LQWLEQQVAKRRTKR

SEQ ID NO: 130 - DNA, 45 bp, Artificial Sequence
  source: /note="Description of Artificial Sequence: Synthetic oligonucleotide"
ctgcaatggctggagcagcaggtggcgaagcggagaactaagcgg

SEQ ID NO: 131 - protein, 18 aa, Artificial Sequence
  source: /note="Description of Artificial Sequence: Synthetic peptide"
GTGAEDPRPSRKRRSLGG

SEQ ID NO: 132 - DNA, 54 bp, Artificial Sequence
  source: /note="Description of Artificial Sequence: Synthetic oligonucleotide"
ggcacaggtgccgaggaccctcggccaagccgcaaaaggaggtcacttggcggc

SEQ ID NO: 133 - protein, 17 aa, Artificial Sequence
  source: /note="Description of Artificial Sequence: Synthetic peptide"
GTGAEDPRPSRKRRSLG

SEQ ID NO: 134 - DNA, 51 bp, Artificial Sequence
  source: /note="Description of Artificial Sequence: Synthetic oligonucleotide"
ggaaccggagcagaagatcccagaccaagccggaaaaggcggtccctgggt

SEQ ID NO: 135 - protein, 14 aa, Artificial Sequence
  source: /note="Description of Artificial Sequence: Synthetic peptide"
SLNLTESHNSRKKR

SEQ ID NO: 136 - DNA, 42 bp, Artificial Sequence
  source: /note="Description of Artificial Sequence: Synthetic oligonucleotide"
agtctcaatttgactgagtcacacaattccaggaagaaaagg

SEQ ID NO: 137 - protein, 14 aa, Artificial Sequence
  source: /note="Description of Artificial Sequence: Synthetic peptide"
CKINGYPKRGRKRR

SEQ ID NO: 138 - DNA, 42 bp, Artificial Sequence
  source: /note="Description of Artificial Sequence: Synthetic oligonucleotide"
tgcaagatcaacggctaccctaagaggggcagaaagcggcgg

SEQ ID NO: 139 - protein, 21 aa, Artificial Sequence
  source: /note="Description of Artificial Sequence: Synthetic peptide"
MALPVTALLLPLALLLHAARP

SEQ ID NO: 140 - DNA, 63 bp, Artificial Sequence; identical to SEQ ID NO: 33
  source: /note="Description of Artificial Sequence: Synthetic oligonucleotide"

SEQ ID NO: 141 - protein, 737 aa, Artificial Sequence; identical to SEQ ID NO: 75
  source: /note="Description of Artificial Sequence: Synthetic polypeptide"

SEQ ID NO: 142 - DNA, 2211 bp, Artificial Sequence; identical to SEQ ID NO: 76
  source: /note="Description of Artificial Sequence: Synthetic polynucleotide"

SEQ ID NO: 143 - protein, 753 aa, Artificial Sequence; identical to SEQ ID NO: 111
  source: /note="Description of Artificial Sequence: Synthetic polypeptide"

SEQ ID NO: 144 - DNA, 2259 bp, Artificial Sequence; identical to SEQ ID NO: 112
  source: /note="Description of Artificial Sequence: Synthetic polynucleotide"

SEQ ID NO: 145 - protein, 753 aa, Artificial Sequence
  source: /note="Description of Artificial Sequence: Synthetic polypeptide"
MALPVTALLLPLALLLHAARPRSSLALSLTADQMVSALLDAEPPILYSEYDPTRPFSEASMMGLLTNLADRELVHMINWAKRVPGFVDLALHDQVHLLECAWMEILMIGLVWRSMEHPGKLLFAPNLLLDRNQGKCVEGGVEIFDMLLATSSRFRMMNLQGEEFVCLKSIILLNSGVYTFLSSTLKSLEEKDHIHRVLDKITDTLIHLMAKAGLTLQQQHQRLAQLLLILSHIRHMSSKRMEHLYSMKCKNVVPLSDLLLEMLDAHRLGTGAEDPRPSRKRRSLGDVGEIVMTQSPATLSLSPGERATLSCRASQDISKYLNWYQQKPGQAPRLLIYHTSRLHSGIPARFSGSGSGTDYTLTISSLQPEDFAVYFCQQGNTLPYTFGQGTKLEIKGGGGSGGGGSGGGGSQVQLQESGPGLVKPSETLSLTCTVSGVSLPDYGVSWIRQPPGKGLEWIGVIWGSETTYYSSSLKSRVTISKDNSKNQVSLKLSSVTAADTAVYYCAKHYYYGGSYAMDYWGQGTLVTVSSTTTPAPRPPTPAPTIASQPLSLRPEACRPAAGGAVHTRGLDFACDIYIWAPLAGTCGVLLLSLVITLYCKRGRKKLLYIFKQPFMRPVQTTQEEDGCSCRFPEEEEGGCELRVKFSRSADAPAYQQGQNQLYNELNLGRREEYDVLDKRRGRDPEMGGKPRRKNPQEGLYNELQKDKMAEAYSEIGMKGERRRGKGHDGLYQGLSTATKDTYDALHMQALPPR

SEQ ID NO: 146 - DNA, 2259 bp, Artificial Sequence
  source: /note="Description of Artificial Sequence: Synthetic polynucleotide"
atggccctccctgtcaccgccctgctgcttccgctggctcttctgctccacgccgctcggccccggtcgtcgttggcactttccctgactgccgaccagatggtgtccgcccttctggacgccgagcctccaattctgtactcggagtacgatccgactcgcccgttctccgaagccagcatgatgggcctgttgactaacctggcggaccgcgagttggtgcacatgattaactgggctaagcgggtgccgggcttcgtggacctggccctgcacgaccaagtgcacctcctggaatgcgcctggatggaaatcctcatgatcggcctcgtgtggagatccatggagcatcccggaaagctcctgtttgcacccaacctcctgcttgatcgcaaccagggaaaatgcgtggaagggggtgtcgagattttcgacatgctgctcgccacctcttcccggttccggatgatgaatctgcagggagaagagttcgtgtgtctgaagtcaatcatcctgctgaactccggggtctataccttcctgagctcgaccctcaagtcactggaggaaaaagaccacatccatcgcgtgctcgataagatcaccgacacccttatccatctcatggcgaaggctggactgaccctgcaacagcagcaccagaggctggcccagttgctgctgattctgagccacatccggcacatgtcgtccaagaggatggaacacctgtacagcatgaagtgcaagaacgtcgtgcctctgtccgatctgctcctggaaatgctggacgcgcacagactcggaaccggcgcggaagacccccggccctccaggaagcgaaggtccctcggagacgtgggtgaaattgtgatgacccagtcacccgccactcttagcctttcacccggtgagcgcgcaaccctgtcttgcagagcctcccaagacatctcaaaataccttaattggtatcaacagaagcccggacaggctcctcgccttctgatctaccacaccagccggctccattctggaatccctgccaggttcagcggtagcggatctgggaccgactacaccctcactatcagctcactgcagccagaggacttcgctgtctatttctgtcagcaagggaacaccctgccctacacctttggacagggcaccaagctcgagattaaaggtggaggtggcagcggaggaggtgggtccggcggtggaggaagccaggtccaactccaagaaagcggaccgggtcttgtgaagccatcagaaactctttcactgacttgtactgtgagcggagtgtctctccccgattacggggtgtcttggatcagacagccaccggggaagggtctggaatggattggagtgatttggggctctgagactacttactactcttcatccctcaagtcacgcgtcaccatctcaaaggacaactctaagaatcaggtgtcactgaaactgtcatctgtgaccgcagccgacaccgccgtgtactattgcgctaagcattactattatggcgggagctacgcaatggattactggggacagggtactctggtcaccgtgtccagcaccactaccccagcaccgaggccacccaccccggctcctaccatcgcctcccagcctctgtccctgcgtccggaggcatgtagacccgcagctggtggggccgtgcatacccggggtcttgacttcgcctgcgatatctacatttgggcccctctggctggtacttgcggggtcctgctgctttcactcgtgatcactctttactgtaagcgcggtcggaagaagctgctgtacatctttaagcaacccttcatgaggcctgtgcagactactcaagaggaggacggctgttcatgccggttcccagaggaggaggaaggcggctgcgaactgcgcgtgaaattcagccgcagcgcagatgctccagcctaccagcaggggcagaaccagctctacaacgaactcaatcttggtcggagagaggagtacgacgtgctggacaagcggagaggacgggacccagaaatgggcgggaagccgcgcagaaagaatccccaagagggcctgtacaacgagctccaaaaggataagatggcagaagcctatagcgagattggtatgaaaggggaacgcagaagaggcaaaggccacgacggactgtaccagggactcagcaccgccaccaaggacacctatgacgctcttcacatgcaggccctgccgcctcgg

SEQ ID NO: 147 - protein, 747 aa, Artificial Sequence; identical to SEQ ID NO: 105
  source: /note="Description of Artificial Sequence: Synthetic polypeptide"

SEQ ID NO: 148 - DNA, 2241 bp, Artificial Sequence
  source: /note="Description of Artificial Sequence: Synthetic polynucleotide"
atggccctccctgtcaccgccctgctgcttccgctggctcttctgctccacgccgctcggccccggtcgtcgttggcactttccctgactgccgaccagatggtgtccgcccttctggacgccgagcctccaattctgtactcggagtacgatccgactcgcccgttctccgaagccagcatgatgggcctgttgactaacctggcggaccgcgagttggtgcacatgattaactgggctaagcgggtgccgggcttcgtggacctggccctgcacgaccaagtgcacctcctggaatgcgcctggatggaaatcctcatgatcggcctcgtgtggagatccatggagcatcccggaaagctcctgtttgcacccaacctcctgcttgatcgcaaccagggaaaatgcgtggaagggggtgtcgagattttcgacatgctgctcgccacctcttcccggttccggatgatgaatctgcagggagaagagttcgtgtgtctgaagtcaatcatcctgctgaactccggggtctataccttcctgagctcgaccctcaagtcactggaggaaaaagaccacatccatcgcgtgctcgataagatcaccgacacccttatccatctcatggcgaaggctggactgaccctgcaacagcagcaccagaggctggcccagttgctgctgattctgagccacatccggcacatgtcgtccaagaggatggaacacctgtacagcatgaagtgcaagaacgtcgtgcctctgtccgatctgctcctggaaatgctggacgcgcacagactcgggacgggagctgaagatccacgacccagcagaaagcgacgggaaattgtgatgacccagtcacccgccactcttagcctttcacccggtgagcgcgcaaccctgtcttgcagagcctcccaagacatctcaaaataccttaattggtatcaacagaagcccggacaggctcctcgccttctgatctaccacaccagccggctccattctggaatccctgccaggttcagcggtagcggatctgggaccgactacaccctcactatcagctcactgcagccagaggacttcgctgtctatttctgtcagcaagggaacaccctgccctacacctttggacagggcaccaagctcgagattaaaggtggaggtggcagcggaggaggtgggtccggcggtggaggaagccaggtccaactccaagaaagcggaccgggtcttgtgaagccatcagaaactctttcactgacttgtactgtgagcggagtgtctctccccgattacggggtgtcttggatcagacagccaccggggaagggtctggaatggattggagtgatttggggctctgagactacttactactcttcatccctcaagtcacgcgtcaccatctcaaaggacaactctaagaatcaggtgtcactgaaactgtcatctgtgaccgcagccgacaccgccgtgtactattgcgctaagcattactattatggcgggagctacgcaatggattactggggacagggtactctggtcaccgtgtccagcaccactaccccagcaccgaggccacccaccccggctcctaccatcgcctcccagcctctgtccctgcgtccggaggcatgtagacccgcagctggtggggccgtgcatacccggggtcttgacttcgcctgcgatatctacatttgggcccctctggctggtacttgcggggtcctgctgctttcactcgtgatcactctttactgtaagcgcggtcggaagaagctgctgtacatctttaagcaacccttcatgaggcctgtgcagactactcaagaggaggacggctgttcatgccggttcccagaggaggaggaaggcggctgcgaactgcgcgtgaaattcagccgcagcgcagatgctccagcctacaagcaggggcagaaccagctctacaacgaactcaatcttggtcggagagaggagtacgacgtgctggacaagcggagaggacgggacccagaaatgggcgggaagccgcgcagaaagaatccccaagagggcctgtacaacgagctccaaaaggataagatggcagaagcctatagcgagattggtatgaaaggggaacgcagaagaggcaaaggccacgacggactgtaccagggactcagcaccgccaccaaggacacctatgacgctcttcacatgcaggccctgccgcctcgg

SEQ ID NO: 149 - protein, 747 aa, Artificial Sequence
  source: /note="Description of Artificial Sequence: Synthetic polypeptide"
MALPVTALLLPLALLLHAARPRSSLALSLTADQMVSALLDAEPPILYSEYDPTRPFSEASMMGLLTNLADRELVHMINWAKRVPGFVDLALHDQVHLLECAWMEILMIGLVWRSMEHPGKLLFAPNLLLDRNQGKCVEGGVEIFDMLLATSSRFRMMNLQGEEFVCLKSIILLNSGVYTFLSSTLKSLEEKDHIHRVLDKITDTLIHLMAKAGLTLQQQHQRLAQLLLILSHIRHMSSKRMEHLYSMKCKNVVPLSDLLLEMLDAHRLGTGAEDPRPSRKRREIVMTQSPATLSLSPGERATLSCRASQDISKYLNWYQQKPGQAPRLLIYHTSRLHSGIPARFSGSGSGTDYTLTISSLQPEDFAVYFCQQGNTLPYTFGQGTKLEIKGGGGSGGGGSGGGGSQVQLQESGPGLVKPSETLSLTCTVSGVSLPDYGVSWIRQPPGKGLEWIGVIWGSETTYYSSSLKSRVTISKDNSKNQVSLKLSSVTAADTAVYYCAKHYYYGGSYAMDYWGQGTLVTVSSTTTPAPRPPTPAPTIASQPLSLRPEACRPAAGGAVHTRGLDFACDIYIWAPLAGTCGVLLLSLVITLYCKRGRKKLLYIFKQPFMRPVQTTQEEDGCSCRFPEEEEGGCELRVKFSRSADAPAYQQGQNQLYNELNLGRREEYDVLDKRRGRDPEMGGKPRRKNPQEGLYNELQKDKMAEAYSEIGMKGERRRGKGHDGLYQGLSTATKDTYDALHMQALPPR

SEQ ID NO: 150 - DNA, 2241 bp, Artificial Sequence
  source: /note="Description of Artificial Sequence: Synthetic polynucleotide"
atggccctccctgtcaccgccctgctgcttccgctggctcttctgctccacgccgctcggccccggtcgtcgttggcactttccctgactgccgaccagatggtgtccgcccttctggacgccgagcctccaattctgtactcggagtacgatccgactcgcccgttctccgaagccagcatgatgggcctgttgactaacctggcggaccgcgagttggtgcacatgattaactgggctaagcgggtgccgggcttcgtggacctggccctgcacgaccaagtgcacctcctggaatgcgcctggatggaaatcctcatgatcggcctcgtgtggagatccatggagcatcccggaaagctcctgtttgcacccaacctcctgcttgatcgcaaccagggaaaatgcgtggaagggggtgtcgagattttcgacatgctgctcgccacctcttcccggttccggatgatgaatctgcagggagaagagttcgtgtgtctgaagtcaatcatcctgctgaactccggggtctataccttcctgagctcgaccctcaagtcactggaggaaaaagaccacatccatcgcgtgctcgataagatcaccgacacccttatccatctcatggcgaaggctggactgaccctgcaacagcagcaccagaggctggcccagttgctgctgattctgagccacatccggcacatgtcgtccaagaggatggaacacctgtacagcatgaagtgcaagaacgtcgtgcctctgtccgatctgctcctggaaatgctggacgcgcacagactcgggacgggagctgaagatccacgacccagcagaaagcgacgggaaattgtgatgacccagtcacccgccactcttagcctttcacccggtgagcgcgcaaccctgtcttgcagagcctcccaagacatctcaaaataccttaattggtatcaacagaagcccggacaggctcctcgccttctgatctaccacaccagccggctccattctggaatccctgccaggttcagcggtagcggatctgggaccgactacaccctcactatcagctcactgcagccagaggacttcgctgtctatttctgtcagcaagggaacaccctgccctacacctttggacagggcaccaagctcgagattaaaggtggaggtggcagcggaggaggtgggtccggcggtggaggaagccaggtccaactccaagaaagcggaccgggtcttgtgaagccatcagaaactctttcactgacttgtactgtgagcggagtgtctctccccgattacggggtgtcttggatcagacagccaccggggaagggtctggaatggattggagtgatttggggctctgagactacttactactcttcatccctcaagtcacgcgtcaccatctcaaaggacaactctaagaatcaggtgtcactgaaactgtcatctgtgaccgcagccgacaccgccgtgtactattgcgctaagcattactattatggcgggagctacgcaatggattactggggacagggtactctggtcaccgtgtccagcaccactaccccagcaccgaggccacccaccccggctcctaccatcgcctcccagcctctgtccctgcgtccggaggcatgtagacccgcagctggtggggccgtgcatacccggggtcttgacttcgcctgcgatatctacatttgggcccctctggctggtacttgcggggtcctgctgctttcactcgtgatcactctttactgtaagcgcggtcggaagaagctgctgtacatctttaagcaacccttcatgaggcctgtgcagactactcaagaggaggacggctgttcatgccggttcccagaggaggaggaaggcggctgcgaactgcgcgtgaaattcagccgcagcgcagatgctccagcctaccagcaggggcagaaccagctctacaacgaactcaatcttggtcggagagaggagtacgacgtgctggacaagcggagaggacgggacccagaaatgggcgggaagccgcgcagaaagaatccccaagagggcctgtacaacgagctccaaaaggataagatggcagaagcctatagcgagattggtatgaaaggggaacgcagaagaggcaaaggccacgacggactgtaccagggactcagcaccgccaccaaggacacctatgacgctcttcacatgcaggccctgccgcctcgg

SEQ ID NO: 151 - protein, 737 aa, Artificial Sequence
  source: /note="Description of Artificial Sequence: Synthetic polypeptide"
MALPVTALLLPLALLLHAARPRSSLALSLTADQMVSALLDAEPPILYSEYDPTRPFSEASMMGLLTNLADRELVHMINWAKRVPGFVDLTLHDQVHLLECAWMEILMIGLVWRSMEHPGKLLFAPNLLLDRNQGKCVEGGVEIFDMLLATSSRFRMMNLQGEEFVCLKSIILLNSGVYTFLSSTLKSLEEKDHIHRVLDKITDTLIHLMAKAGLTLQQQHQRLAQLLLILSHIRHMSNKRMEHLYSMKCKNVVPLSDLLLEMLDAHRLRTKREIVMTQSPATLSLSPGERATLSCRASQDISKYLNWYQQKPGQAPRLLIYHTSRLHSGIPARFSGSGSGTDYTLTISSLQPEDFAVYFCQQGNTLPYTFGQGTKLEIKGGGGSGGGGSGGGGSQVQLQESGPGLVKPSETLSLTCTVSGVSLPDYGVSWIRQPPGKGLEWIGVIWGSETTYYSSSLKSRVTISKDNSKNQVSLKLSSVTAADTAVYYCAKHYYYGGSYAMDYWGQGTLVTVSSTTTPAPRPPTPAPTIASQPLSLRPEACRPAAGGAVHTRGLDFACDIYIWAPLAGTCGVLLLSLVITLYCKRGRKKLLYIFKQPFMRPVQTTQEEDGCSCRFPEEEEGGCELRVKFSRSADAPAYKQGQNQLYNELNLGRREEYDVLDKRRGRDPEMGGKPRRKNPQEGLYNELQKDKMAEAYSEIGMKGERRRGKGHDGLYQGLSTATKDTYDALHMQALPPR

SEQ ID NO: 152 - DNA, 2211 bp, Artificial Sequence
  source: /note="Description of Artificial Sequence: Synthetic polynucleotide"
atggccctccctgtcaccgccctgctgcttccgctggctcttctgctccacgccgctcggccccggtcgtcgttggcactttccctgactgccgaccagatggtgtccgcccttctggacgccgagcctccaattctgtactcggagtacgatccgactcgcccgttctccgaagccagcatgatgggcctgttgactaacctggcggaccgcgagttggtgcacatgattaactgggctaagcgggtgccgggcttcgtggacctgaccctgcacgaccaagtgcacctcctggaatgcgcctggatggaaatcctcatgatcggcctcgtgtggagatccatggagcatcccggaaagctcctgtttgcacccaacctcctgcttgatcgcaaccagggaaaatgcgtggaagggggtgtcgagattttcgacatgctgctcgccacctcttcccggttccggatgatgaatctgcagggagaagagttcgtgtgtctgaagtcaatcatcctgctgaactccggggtctataccttcctgagctcgaccctcaagtcactggaggaaaaagaccacatccatcgcgtgctcgataagatcaccgacacccttatccatctcatggcgaaggctggactgaccctgcaacagcagcaccagaggctggcccagttgctgctgattctgagccacatccggcacatgtcgaacaagaggatggaacacctgtacagcatgaagtgcaagaacgtcgtgcctctgtccgatctgctcctggaaatgctggacgcgcacagactccgtactaaaagagaaattgtgatgacccagtcacccgccactcttagcctttcacccggtgagcgcgcaaccctgtcttgcagagcctcccaagacatctcaaaataccttaattggtatcaacagaagcccggacaggctcctcgccttctgatctaccacaccagccggctccattctggaatccctgccaggttcagcggtagcggatctgggaccgactacaccctcactatcagctcactgcagccagaggacttcgctgtctatttctgtcagcaagggaacaccctgccctacacctttggacagggcaccaagctcgagattaaaggtggaggtggcagcggaggaggtgggtccggcggtggaggaagccaggtccaactccaagaaagcggaccgggtcttgtgaagccatcagaaactctttcactgacttgtactgtgagcggagtgtctctccccgattacggggtgtcttggatcagacagccaccggggaagggtctggaatggattggagtgatttggggctctgagactacttactactcttcatccctcaagtcacgcgtcaccatctcaaaggacaactctaagaatcaggtgtcactgaaactgtcatctgtgaccgcagccgacaccgccgtgtactattgcgctaagcattactattatggcgggagctacgcaatggattactggggacagggtactctggtcaccgtgtccagcaccactaccccagcaccgaggccacccaccccggctcctaccatcgcctcccagcctctgtccctgcgtccggaggcatgtagacccgcagctggtggggccgtgcatacccggggtcttgacttcgcctgcgatatctacatttgggcccctctggctggtacttgcggggtcctgctgctttcactcgtgatcactctttactgtaagcgcggtcggaagaagctgctgtacatctttaagcaacccttcatgaggcctgtgcagactactcaagaggaggacggctgttcatgccggttcccagaggaggaggaaggcggctgcgaactgcgcgtgaaattcagccgcagcgcagatgctccagcctacaagcaggggcagaaccagctctacaacgaactcaatcttggtcggagagaggagtacgacgtgctggacaagcggagaggacgggacccagaaatgggcgggaagccgcgcagaaagaatccccaagagggcctgtacaacgagctccaaaaggataagatggcagaagcctatagcgagattggtatgaaaggggaacgcagaagaggcaaaggccacgacggactgtaccagggactcagcaccgccaccaaggacacctatgacgctcttcacatgcaggccctgccgcctcgg

SEQ ID NO: 153 - protein, 753 aa, Artificial Sequence
  source: /note="Description of Artificial Sequence: Synthetic polypeptide"
MALPVTALLLPLALLLHAARPRSSLALSLTADQMVSALLDAEPPILYSEYDPTRPFSEASMMGLLTNLADRELVHMINWAKRVPGFVDLTLHDQVHLLECAWMEILMIGLVWRSMEHPGKLLFAPNLLLDRNQGKCVEGGVEIFDMLLATSSRFRMMNLQGEEFVCLKSIILLNSGVYTFLSSTLKSLEEKDHIHRVLDKITDTLIHLMAKAGLTLQQQHQRLAQLLLILSHIRHMSNKRMEHLYSMKCKNVVPLSDLLLEMLDAHRLGTGAEDPRPSRKRRSLGDVGEIVMTQSPATLSLSPGERATLSCRASQDISKYLNWYQQKPGQAPRLLIYHTSRLHSGIPARFSGSGSGTDYTLTISSLQPEDFAVYFCQQGNTLPYTFGQGTKLEIKGGGGSGGGGSGGGGSQVQLQESGPGLVKPSETLSLTCTVSGVSLPDYGVSWIRQPPGKGLEWIGVIWGSETTYYSSSLKSRVTISKDNSKNQVSLKLSSVTAADTAVYYCAKHYYYGGSYAMDYWGQGTLVTVSSTTTPAPRPPTPAPTIASQPLSLRPEACRPAAGGAVHTRGLDFACDIYIWAPLAGTCGVLLLSLVITLYCKRGRKKLLYIFKQPFMRPVQTTQEEDGCSCRFPEEEEGGCELRVKFSRSADAPAYKQGQNQLYNELNLGRREEYDVLDKRRGRDPEMGGKPRRKNPQEGLYNELQKDKMAEAYSEIGMKGERRRGKGHDGLYQGLSTATKDTYDALHMQALPPR

SEQ ID NO: 154 - DNA, 2259 bp, Artificial Sequence
  source: /note="Description of Artificial Sequence: Synthetic polynucleotide"
atggccctccctgtcaccgccctgctgcttccgctggctcttctgctccacgccgctcggccccggtcgtcgttggcactttccctgactgccgaccagatggtgtccgcccttctggacgccgagcctccaattctgtactcggagtacgatccgactcgcccgttctccgaagccagcatgatgggcctgttgactaacctggcggaccgcgagttggtgcacatgattaactgggctaagcgggtgccgggcttcgtggacctgaccctgcacgaccaagtgcacctcctggaatgcgcctggatggaaatcctcatgatcggcctcgtgtggagatccatggagcatcccggaaagctcctgtttgcacccaacctcctgcttgatcgcaaccagggaaaatgcgtggaagggggtgtcgagattttcgacatgctgctcgccacctcttcccggttccggatgatgaatctgcagggagaagagttcgtgtgtctgaagtcaatcatcctgctgaactccggggtctataccttcctgagctcgaccctcaagtcactggaggaaaaagaccacatccatcgcgtgctcgataagatcaccgacacccttatccatctcatggcgaaggctggactgaccctgcaacagcagcaccagaggctggcccagttgctgctgattctgagccacatccggcacatgtcgaacaagaggatggaacacctgtacagcatgaagtgcaagaacgtcgtgcctctgtccgatctgctcctggaaatgctggacgcgcacagactcggaaccggcgcggaagacccccggccctccaggaagcgaaggtccctcggagacgtgggtgaaattgtgatgacccagtcacccgccactcttagcctttcacccggtgagcgcgcaaccctgtcttgcagagcctcccaagacatctcaaaataccttaattggtatcaacagaagcccggacaggctcctcgccttctgatctaccacaccagccggctccattctggaatccctgccaggttcagcggtagcggatctgggaccgactacaccctcactatcagctcactgcagccagaggacttcgctgtctatttctgtcagcaagggaacaccctgccctacacctttggacagggcaccaagctcgagattaaaggtggaggtggcagcggaggaggtgggtccggcggtggaggaagccaggtccaactccaagaaagcggaccgggtcttgtgaagccatcagaaactctttcactgacttgtactgtgagcggagtgtctctccccgattacggggtgtcttggatcagacagccaccggggaagggtctggaatggattggagtgatttggggctctgagactacttactactcttcatccctcaagtcacgcgtcaccatctcaaaggacaactctaagaatcaggtgtcactgaaactgtcatctgtgaccgcagccgacaccgccgtgtactattgcgctaagcattactattatggcgggagctacgcaatggattactggggacagggtactctggtcaccgtgtccagcaccactaccccagcaccgaggccacccaccccggctcctaccatcgcctcccagcctctgtccctgcgtccggaggcatgtagacccgcagctggtggggccgtgcatacccggggtcttgacttcgcctgcgatatctacatttgggcccctctggctggtacttgcggggtcctgctgctttcactcgtgatcactctttactgtaagcgcggtcggaagaagctgctgtacatctttaagcaacccttcatgaggcctgtgcagactactcaagaggaggacggctgttcatgccggttcccagaggaggaggaaggcggctgcgaactgcgcgtgaaattcagccgcagcgcagatgctccagcctacaagcaggggcagaaccagctctacaacgaactcaatcttggtcggagagaggagtacgacgtgctggacaagcggagaggacgggacccagaaatgggcgggaagccgcgcagaaagaatccccaagagggcctgtacaacgagctccaaaaggataagatggcagaagcctatagcgagattggtatgaaaggggaacgcagaagaggcaaaggccacgacggactgtaccagggactcagcaccgccaccaaggacacctatgacgctcttcacatgcaggccctgccgcctcgg

SEQ ID NO: 155 - protein, 753 aa, Artificial Sequence
  source: /note="Description of Artificial Sequence: Synthetic polypeptide"
MALPVTALLLPLALLLHAARPRSSLALSLTADQMVSALLDAEPPILYSEYDPTRPFSEASMMGLLTNLADRELVHMINWAKRVPGFVDLTLHDQVHLLECAWMEILMIGLVWRSMEHPGKLLFAPNLLLDRNQGKCVEGGVEIFDMLLATSSRFRMMNLQGEEFVCLKSIILLNSGVYTFLSSTLKSLEEKDHIHRVLDKITDTLIHLMAKAGLTLQQQHQRLAQLLLILSHIRHMSNKRMEHLYSMKCKNVVPLSDLLLEMLDAHRLGTGAEDPRPSRKRRSLGDVGEIVMTQSPATLSLSPGERATLSCRASQDISKYLNWYQQKPGQAPRLLIYHTSRLHSGIPARFSGSGSGTDYTLTISSLQPEDFAVYFCQQGNTLPYTFGQGTKLEIKGGGGSGGGGSGGGGSQVQLQESGPGLVKPSETLSLTCTVSGVSLPDYGVSWIRQPPGKGLEWIGVIWGSETTYYSSSLKSRVTISKDNSKNQVSLKLSSVTAADTAVYYCAKHYYYGGSYAMDYWGQGTLVTVSSTTTPAPRPPTPAPTIASQPLSLRPEACRPAAGGAVHTRGLDFACDIYIWAPLAGTCGVLLLSLVITLYCKRGRKKLLYIFKQPFMRPVQTTQEEDGCSCRFPEEEEGGCELRVKFSRSADAPAYQQGQNQLYNELNLGRREEYDVLDKRRGRDPEMGGKPRRKNPQEGLYNELQKDKMAEAYSEIGMKGERRRGKGHDGLYQGLSTATKDTYDALHMQALPPR

SEQ ID NO: 156 - DNA, 2259 bp, Artificial Sequence
  source: /note="Description of Artificial Sequence: Synthetic polynucleotide"
atggccctccctgtcaccgccctgctgcttccgctggctcttctgctccacgccgctcggccccggtcgtcgttggcactttccctgactgccgaccagatggtgtccgcccttctggacgccgagcctccaattctgtactcggagtacgatccgactcgcccgttctccgaagccagcatgatgggcctgttgactaacctggcggaccgcgagttggtgcacatgattaactgggctaagcgggtgccgggcttcgtggacctgaccctgcacgaccaagtgcacctcctggaatgcgcctggatggaaatcctcatgatcggcctcgtgtggagatccatggagcatcccggaaagctcctgtttgcacccaacctcctgcttgatcgcaaccagggaaaatgcgtggaagggggtgtcgagattttcgacatgctgctcgccacctcttcccggttccggatgatgaatctgcagggagaagagttcgtgtgtctgaagtcaatcatcctgctgaactccggggtctataccttcctgagctcgaccctcaagtcactggaggaaaaagaccacatccatcgcgtgctcgataagatcaccgacacccttatccatctcatggcgaaggctggactgaccctgcaacagcagcaccagaggctggcccagttgctgctgattctgagccacatccggcacatgtcgaacaagaggatggaacacctgtacagcatgaagtgcaagaacgtcgtgcctctgtccgatctgctcctggaaatgctggacgcgcacagactcggaaccggcgcggaagacccccggccctccaggaagcgaaggtccctcggagacgtgggtgaaattgtgatgacccagtcacccgccactcttagcctttcacccggtgagcgcgcaaccctgtcttgcagagcctcccaagacatctcaaaataccttaattggtatcaacagaagcccggacaggctcctcgccttctgatctaccacaccagccggctccattctggaatccctgccaggttcagcggtagcggatctgggaccgactacaccctcactatcagctcactgcagccagaggacttcgctgtctatttctgtcagcaagggaacaccctgccctacacctttggacagggcaccaagctcgagattaaaggtggaggtggcagcggaggaggtgggtccggcggtggaggaagccaggtccaactccaagaaagcggaccgggtcttgtgaagccatcagaaactctttcactgacttgtactgtgagcggagtgtctctccccgattacggggtgtcttggatcagacagccaccggggaagggtctggaatggattggagtgatttggggctctgagactacttactactcttcatccctcaagtcacgcgtcaccatctcaaaggacaactctaagaatcaggtgtcactgaaactgtcatctgtgaccgcagccgacaccgccgtgtactattgcgctaagcattactattatggcgggagctacgcaatggattactggggacagggtactctggtcaccgtgtccagcaccactaccccagcaccgaggccacccaccccggctcctaccatcgcctcccagcctctgtccctgcgtccggaggcatgtagacccgcagctggtggggccgtgcatacccggggtcttgacttcgcctgcgatatctacatttgggcccctctggctggtacttgcggggtcctgctgctttcactcgtgatcactctttactgtaagcgcggtcggaagaagctgctgtacatctttaagcaacccttcatgaggcctgtgcagactactcaagaggaggacggctgttcatgccggttcccagaggaggaggaaggcggctgcgaactgcgcgtgaaattcagccgcagcgcagatgctccagcctaccagcaggggcagaaccagctctacaacgaactcaatcttggtcggagagaggagtacgacgtgctggacaagcggagaggacgggacccagaaatgggcgggaagccgcgcagaaagaatccccaagagggcctgtacaacgagctccaaaaggataagatggcagaagcctatagcgagattggtatgaaaggggaacgcagaagaggcaaaggccacgacggactgtaccagggactcagcaccgccaccaaggacacctatgacgctcttcacatgcaggccctgccgcctcgg

SEQ ID NO: 157 - protein, 747 aa, Artificial Sequence
  source: /note="Description of Artificial Sequence: Synthetic polypeptide"
MALPVTALLLPLALLLHAARPRSSLALSLTADQMVSALLDAEPPILYSEYDPTRPFSEASMMGLLTNLADRELVHMINWAKRVPGFVDLTLHDQVHLLECAWMEILMIGLVWRSMEHPGKLLFAPNLLLDRNQGKCVEGGVEIFDMLLATSSRFRMMNLQGEEFVCLKSIILLNSGVYTFLSSTLKSLEEKDHIHRVLDKITDTLIHLMAKAGLTLQQQHQRLAQLLLILSHIRHMSNKRMEHLYSMKCKNVVPLSDLLLEMLDAHRLGTGAEDPRPSRKRREIVMTQSPATLSLSPGERATLSCRASQDISKYLNWYQQKPGQAPRLLIYHTSRLHSGIPARFSGSGSGTDYTLTISSLQPEDFAVYFCQQGNTLPYTFGQGTKLEIKGGGGSGGGGSGGGGSQVQLQESGPGLVKPSETLSLTCTVSGVSLPDYGVSWIRQPPGKGLEWIGVIWGSETTYYSSSLKSRVTISKDNSKNQVSLKLSSVTAADTAVYYCAKHYYYGGSYAMDYWGQGTLVTVSSTTTPAPRPPTPAPTIASQPLSLRPEACRPAAGGAVHTRGLDFACDIYIWAPLAGTCGVLLLSLVITLYCKRGRKKLLYIFKQPFMRPVQTTQEEDGCSCRFPEEEEGGCELRVKFSRSADAPAYKQGQNQLYNELNLGRREEYDVLDKRRGRDPEMGGKPRRKNPQEGLYNELQKDKMAEAYSEIGMKGERRRGKGHDGLYQGLSTATKDTYDALHMQALPPR

SEQ ID NO: 158 - DNA, 2241 bp, Artificial Sequence
  source: /note="Description of Artificial Sequence: Synthetic polynucleotide"
atggccctccctgtcaccgccctgctgcttccgctggctcttctgctccacgccgctcggccccggtcgtcgttggcactttccctgactgccgaccagatggtgtccgcccttctggacgccgagcctccaattctgtactcggagtacgatccgactcgcccgttctccgaagccagcatgatgggcctgttgactaacctggcggaccgcgagttggtgcacatgattaactgggctaagcgggtgccgggcttcgtggacctgaccctgcacgaccaagtgcacctcctggaatgcgcctggatggaaatcctcatgatcggcctcgtgtggagatccatggagcatcccggaaagctcctgtttgcacccaacctcctgcttgatcgcaaccagggaaaatgcgtggaagggggtgtcgagattttcgacatgctgctcgccacctcttcccggttccggatgatgaatctgcagggagaagagttcgtgtgtctgaagtcaatcatcctgctgaactccggggtctataccttcctgagctcgaccctcaagtcactggaggaaaaagaccacatccatcgcgtgctcgataagatcaccgacacccttatccatctcatggcgaaggctggactgaccctgcaacagcagcaccagaggctggcccagttgctgctgattctgagccacatccggcacatgtcgaacaagaggatggaacacctgtacagcatgaagtgcaagaacgtcgtgcctctgtccgatctgctcctggaaatgctggacgcgcacagactcgggacgggagctgaagatccacgacccagcagaaagcgacgggaaattgtgatgacccagtcacccgccactcttagcctttcacccggtgagcgcgcaaccctgtcttgcagagcctcccaagacatctcaaaataccttaattggtatcaacagaagcccggacaggctcctcgccttctgatctaccacaccagccggctccattctggaatccctgccaggttcagcggtagcggatctgggaccgactacaccctcactatcagctcactgcagccagaggacttcgctgtctatttctgtcagcaagggaacaccctgccctacacctttggacagggcaccaagctcgagattaaaggtggaggtggcagcggaggaggtgggtccggcggtggaggaagccaggtccaactccaagaaagcggaccgggtcttgtgaagccatcagaaactctttcactgacttgtactgtgagcggagtgtctctccccgattacggggtgtcttggatcagacagccaccggggaagggtctggaatggattggagtgatttggggctctgagactacttactactcttcatccctcaagtcacgcgtcaccatctcaaaggacaactctaagaatcaggtgtcactgaaactgtcatctgtgaccgcagccgacaccgccgtgtactattgcgctaagcattactattatggcgggagctacgcaatggattactggggacagggtactctggtcaccgtgtccagcaccactaccccagcaccgaggccacccaccccggctcctaccatcgcctcccagcctctgtccctgcgtccggaggcatgtagacccgcagctggtggggccgtgcatacccggggtcttgacttcgcctgcgatatctacatttgggcccctctggctggtacttgcggggtcctgctgctttcactcgtgatcactctttactgtaagcgcggtcggaagaagctgctgtacatctttaagcaacccttcatgaggcctgtgcagactactcaagaggaggacggctgttcatgccggttcccagaggaggaggaaggcggctgcgaactgcgcgtgaaattcagccgcagcgcagatgctccagcctacaagcaggggcagaaccagctctacaacgaactcaatcttggtcggagagaggagtacgacgtgctggacaagcggagaggacgggacccagaaatgggcgggaagccgcgcagaaagaatccccaagagggcctgtacaacgagctccaaaaggataagatggcagaagcctatagcgagattggtatgaaaggggaacgcagaagaggcaaaggccacgacggactgtaccagggactcagcaccgccaccaaggacacctatgacgctcttcacatgcaggccctgccgcctcgg

SEQ ID NO: 159 - protein, 747 aa, Artificial Sequence
  source: /note="Description of Artificial Sequence: Synthetic polypeptide"
MALPVTALLLPLALLLHAARPRSSLALSLTADQMVSALLDAEPPILYSEYDPTRPFSEASMMGLLTNLADRELVHMINWAKRVPGFVDLTLHDQVHLLECAWMEILMIGLVWRSMEHPGKLLFAPNLLLDRNQGKCVEGGVEIFDMLLATSSRFRMMNLQGEEFVCLKSIILLNSGVYTFLSSTLKSLEEKDHIHRVLDKITDTLIHLMAKAGLTLQQQHQRLAQLLLILSHIRHMSNKRMEHLYSMKCKNVVPLSDLLLEMLDAHRLGTGAEDPRPSRKRREIVMTQSPATLSLSPGERATLSCRASQDISKYLNWYQQKPGQAPRLLIYHTSRLHSGIPARFSGSGSGTDYTLTISSLQPEDFAVYFCQQGNTLPYTFGQGTKLEIKGGGGSGGGGSGGGGSQVQLQESGPGLVKPSETLSLTCTVSGVSLPDYGVSWIRQPPGKGLEWIGVIWGSETTYYSSSLKSRVTISKDNSKNQVSLKLSSVTAADTAVYYCAKHYYYGGSYAMDYWGQGTLVTVSSTTTPAPRPPTPAPTIASQPLSLRPEACRPAAGGAVHTRGLDFACDIYIWAPLAGTCGVLLLSLVITLYCKRGRKKLLYIFKQPFMRPVQTTQEEDGCSCRFPEEEEGGCELRVKFSRSADAPAYQQGQNQLYNELNLGRREEYDVLDKRRGRDPEMGGKPRRKNPQEGLYNELQKDKMAEAYSEIGMKGERRRGKGHDGLYQGLSTATKDTYDALHMQALPPR

SEQ ID NO: 160 - DNA, 2241 bp, Artificial Sequence
  source: /note="Description of Artificial Sequence: Synthetic polynucleotide"
atggccctccctgtcaccgccctgctgcttccgctggctcttctgctccacgccgctcggccccggtcgtcgttggcactttccctgactgccgaccagatggtgtccgcccttctggacgccgagcctccaattctgtactcggagtacgatccgactcgcccgttctccgaagccagcatgatgggcctgttgactaacctggcggaccgcgagttggtgcacatgattaactgggctaagcgggtgccgggcttcgtggacctgaccctgcacgaccaagtgcacctcctggaatgcgcctggatggaaatcctcatgatcggcctcgtgtggagatccatggagcatcccggaaagctcctgtttgcacccaacctcctgcttgatcgcaaccagggaaaatgcgtggaagggggtgtcgagattttcgacatgctgctcgccacctcttcccggttccggatgatgaatctgcagggagaagagttcgtgtgtctgaagtcaatcatcctgctgaactccggggtctataccttcctgagctcgaccctcaagtcactggaggaaaaagaccacatccatcgcgtgctcgataagatcaccgacacccttatccatctcatggcgaaggctggactgaccctgcaacagcagcaccagaggctggcccagttgctgctgattctgagccacatccggcacatgtcgaacaagaggatggaacacctgtacagcatgaagtgcaagaacgtcgtgcctctgtccgatctgctcctggaaatgctggacgcgcacagactcgggacgggagctgaagatccacgacccagcagaaagcgacgggaaattgtgatgacccagtcacccgccactcttagcctttcacccggtgagcgcgcaaccctgtcttgcagagcctcccaagacatctcaaaataccttaattggtatcaacagaagcccggacaggctcctcgccttctgatctaccacaccagccggctccattctggaatccctgccaggttcagcggtagcggatctgggaccgactacaccctcactatcagctcactgcagccagaggacttcgctgtctatttctgtcagcaagggaacaccctgccctacacctttggacagggcaccaagctcgagattaaaggtggaggtggcagcggaggaggtgggtccggcggtggaggaagccaggtccaactccaagaaagcggaccgggtcttgtgaagccatcagaaactctttcactgacttgtactgtgagcggagtgtctctccccgattacggggtgtcttggatcagacagccaccggggaagggtctggaatggattggagtgatttggggctctgagactacttactactcttcatccctcaagtcacgcgtcaccatctcaaaggacaactctaagaatcaggtgtcactgaaactgtcatctgtgaccgcagccgacaccgccgtgtactattgcgctaagcattactattatggcgggagctacgcaatggattactggggacagggtactctggtcaccgtgtccagcaccactaccccagcaccgaggccacccaccccggctcctaccatcgcctcccagcctctgtccctgcgtccggaggcatgtagacccgcagctggtggggccgtgcatacccggggtcttgacttcgcctgcgatatctacatttgggcccctctggctggtacttgcggggtcctgctgctttcactcgtgatcactctttactgtaagcgcggtcggaagaagctgctgtacatctttaagcaacccttcatgaggcctgtgcagactactcaagaggaggacggctgttcatgccggttcccagaggaggaggaaggcggctgcgaactgcgcgtgaaattcagccgcagcgcagatgctccagcctaccagcaggggcagaaccagctctacaacgaactcaatcttggtcggagagaggagtacgacgtgctggacaagcggagaggacgggacccagaaatgggcgggaagccgcgcagaaagaatccccaagagggcctgtacaacgagctccaaaaggataagatggcagaagcctatagcgagattggtatgaaaggggaacgcagaagaggcaaaggccacgacggactgtaccagggactcagcaccgccaccaaggacacctatgacgctcttcacatgcaggccctgccgcctcgg

SEQ ID NO: 161 - protein, 738 aa, Artificial Sequence
  source: /note="Description of Artificial Sequence: Synthetic polypeptide"
MALPVTALLLPLALLLHAARPRSSLALSLTADQMVSALLDAEPPILYSEYDPTRPFSEASMMGLLTNLADRELVHMINWAKRVPGFVDLALHDQVHLLECAWMEILMIGLVWRSMEHPGKLLFAPNLLLDRNQGKCVEGGVEIFDMLLATSSRFRMMNLQGEEFVCLKSIILLNSGVYTFLSSTLKSLEEKDHIHRVLDKITDTLIHLMAKAGLTLQQQHQRLAQLLLILSHIRHMSSKRMEHLYSMKCKNVVPLSDLLLEMLDAHRLRTKRQVQLVQSGAEVKKPGASVKVSCKASGYTFTGYYMHWVRQAPGQGLEWMGWINPNSGGTNYAQKFQGRVTLTRDTSISTVYMELSRLRSDDTAVYYCARDMNILATVPFDIWGQGTMVTVSSGGGGSGGGGSGGGGSDIQMTQSPSSLSASVGDRVTITCRASQSISSYLNWYQQKPGKAPKLLIYAASSLQSGVPSRFSGSGSGTDFTLTVNSLQPEDFATYYCQQGDSVPLTFGGGTRLEIKTTTPAPRPPTPAPTIASQPLSLRPEACRPAAGGAVHTRGLDFACDIYIWAPLAGTCGVLLLSLVITLYCKRGRKKLLYIFKQPFMRPVQTTQEEDGCSCRFPEEEEGGCELRVKFSRSADAPAYQQGQNQLYNELNLGRREEYDVLDKRRGRDPEMGGKPRRKNPQEGLYNELQKDKMAEAYSEIGMKGERRRGKGHDGLYQGLSTATKDTYDALHMQALPPR

SEQ ID NO: 162 - DNA, 2214 bp, Artificial Sequence
  source: /note="Description of Artificial Sequence: Synthetic polynucleotide"
atggccctccctgtcaccgccctgctgcttccgctggctcttctgctccacgccgctcggccccggtcgtcgttggcactttccctgactgccgaccagatggtgtccgcccttctggacgccgagcctccaattctgtactcggagtacgatccgactcgcccgttctccgaagccagcatgatgggcctgttgactaacctggcggaccgcgagttggtgcacatgattaactgggctaagcgggtgccgggcttcgtggacctggccctgcacgaccaagtgcacctcctggaatgcgcctggatggaaatcctcatgatcggcctcgtgtggagatccatggagcatcccggaaagctcctgtttgcacccaacctcctgcttgatcgcaaccagggaaaatgcgtggaagggggtgtcgagattttcgacatgctgctcgccacctcttcccggttccggatgatgaatctgcagggagaagagttcgtgtgtctgaagtcaatcatcctgctgaactccggggtctataccttcctgagctcgaccctcaagtcactggaggaaaaagaccacatccatcgcgtgctcgataagatcaccgacacccttatccatctcatggcgaaggctggactgaccctgcaacagcagcaccagaggctggcccagttgctgctgattctgagccacatccggcacatgtcgtccaagaggatggaacacctgtacagcatgaagtgcaagaacgtcgtgcctctgtccgatctgctcctggaaatgctggacgcgcacagactccgtactaaaagacaagtgcaactcgtccaaagcggagcggaagtcaagaaacccggagcgagcgtgaaagtgtcctgcaaagcctccggctacacctttacgggctactacatgcactgggtgcgccaggcaccaggacagggtcttgaatggatgggatggatcaaccctaattcgggcggaactaactacgcacagaagttccaggggagagtgactctgactcgggatacctccatctcaactgtctacatggaactctcccgcttgcggtcagatgatacggcagtgtactactgcgcccgcgacatgaatatcctggctaccgtgccgttcgacatctggggacaggggactatggttactgtctcatcgggcggtggaggttcaggaggaggcggctcgggaggcggaggttcggacattcagatgacccagtccccatcctctctgtcggccagcgtcggagatagggtgaccattacctgtcgggcctcgcaaagcatctcctcgtacctcaactggtatcagcaaaagccgggaaaggcgcctaagctgctgatctacgccgcttcgagcttgcaaagcggggtgccatccagattctcgggatcaggctcaggaaccgacttcaccctgaccgtgaacagcctccagccggaggactttgccacttactactgccagcagggagactccgtgccgcttactttcggggggggtacccgcctggagatcaagaccactaccccagcaccgaggccacccaccccggctcctaccatcgcctcccagcctctgtccctgcgtccggaggcatgtagacccgcagctggtggggccgtgcatacccggggtcttgacttcgcctgcgatatctacatttgggcccctctggctggtacttgcggggtcctgctgctttcactcgtgatcactctttactgtaagcgcggtcggaagaagctgctgtacatctttaagcaacccttcatgaggcctgtgcagactactcaagaggaggacggctgttcatgccggttcccagaggaggaggaaggcggctgcgaactgcgcgtgaaattcagccgcagcgcagatgctccagcctaccagcaggggcagaaccagctctacaacgaactcaatcttggtcggagagaggagtacgacgtgctggacaagcggagaggacgggacccagaaatgggcgggaagccgcgcagaaagaatccccaagagggcctgtacaacgagctccaaaaggataagatggcagaagcctatagcgagattggtatgaaaggggaacgcagaagaggcaaaggccacgacggactgtaccagggactcagcaccgccaccaaggacacctatgacgctcttcacatgcaggccctgccgcctcgg

SEQ ID NO: 163 - protein, 754 aa, Artificial Sequence
  source: /note="Description of Artificial Sequence: Synthetic polypeptide"
MALPVTALLLPLALLLHAARPRSSLALSLTADQMVSALLDAEPPILYSEYDPTRPFSEASMMGLLTNLADRELVHMINWAKRVPGFVDLALHDQVHLLECAWMEILMIGLVWRSMEHPGKLLFAPNLLLDRNQGKCVEGGVEIFDMLLATSSRFRMMNLQGEEFVCLKSIILLNSGVYTFLSSTLKSLEEKDHIHRVLDKITDTLIHLMAKAGLTLQQQHQRLAQLLLILSHIRHMSSKRMEHLYSMKCKNVVPLSDLLLEMLDAHRLGTGAEDPRPSRKRRSLGDVGQVQLVQSGAEVKKPGASVKVSCKASGYTFTGYYMHWVRQAPGQGLEWMGWINPNSGGTNYAQKFQGRVTLTRDTSISTVYMELSRLRSDDTAVYYCARDMNILATVPFDIWGQGTMVTVSSGGGGSGGGGSGGGGSDIQMTQSPSSLSASVGDRVTITCRASQSISSYLNWYQQKPGKAPKLLIYAASSLQSGVPSRFSGSGSGTDFTLTVNSLQPEDFATYYCQQGDSVPLTFGGGTRLEIKTTTPAPRPPTPAPTIASQPLSLRPEACRPAAGGAVHTRGLDFACDIYIWAPLAGTCGVLLLSLVITLYCKRGRKKLLYIFKQPFMRPVQTTQEEDGCSCRFPEEEEGGCELRVKFSRSADAPAYQQGQNQLYNELNLGRREEYDVLDKRRGRDPEMGGKPRRKNPQEGLYNELQKDKMAEAYSEIGMKGERRRGKGHDGLYQGLSTATKDTYDALHMQALPPR

SEQ ID NO: 164 - DNA, 2262 bp, Artificial Sequence
  source: /note="Description of Artificial Sequence: Synthetic polynucleotide"
atggccctccctgtcaccgccctgctgcttccgctggctcttctgctccacgccgctcggccccggtcgtcgttggcactttccctgactgccgaccagatggtgtccgcccttctggacgccgagcctccaattctgtactcggagtacgatccgactcgcccgttctccgaagccagcatgatgggcctgttgactaacctggcggaccgcgagttggtgcacatgattaactgggctaagcgggtgccgggcttcgtggacctggccctgcacgaccaagtgcacctcctggaatgcgcctggatggaaatcctcatgatcggcctcgtgtggagatccatggagcatcccggaaagctcctgtttgcacccaacctcctgcttgatcgcaaccagggaaaatgcgtggaagggggtgtcgagattttcgacatgctgctcgccacctcttcccggttccggatgatgaatctgcagggagaagagttcgtgtgtctgaagtcaatcatcctgctgaactccggggtctataccttcctgagctcgaccctcaagtcactggaggaaaaagaccacatccatcgcgtgctcgataagatcaccgacacccttatccatctcatggcgaaggctggactgaccctgcaacagcagcaccagaggctggcccagttgctgctgattctgagccacatccggcacatgtcgtccaagaggatggaacacctgtacagcatgaagtgcaagaacgtcgtgcctctgtccgatctgctcctggaaatgctggacgcgcacagactcggaaccggcgcggaagacccccggccctccaggaagcgaaggtccctcggagacgtgggtcaagtgcaactcgtccaaagcggagcggaagtcaagaaacccggagcgagcgtgaaagtgtcctgcaaagcctccggctacacctttacgggctactacatgcactgggtgcgccaggcaccaggacagggtcttgaatggatgggatggatcaaccctaattcgggcggaactaactacgcacagaagttccaggggagagtgactctgactcgggatacctccatctcaactgtctacatggaactctcccgcttgcggtcagatgatacggcagtgtactactgcgcccgcgacatgaatatcctggctaccgtgccgttcgacatctggggacaggggactatggttactgtctcatcgggcggtggaggttcaggaggaggcggctcgggaggcggaggttcggacattcagatgacccagtccccatcctctctgtcggccagcgtcggagatagggtgaccattacctgtcgggcctcgcaaagcatctcctcgtacctcaactggtatcagcaaaagccgggaaaggcgcctaagctgctgatctacgccgcttcgagcttgcaaagcggggtgccatccagattctcgggatcaggctcaggaaccgacttcaccctgaccgtgaacagcctccagccggaggactttgccacttactactgccagcagggagactccgtgccgcttactttcggggggggtacccgcctggagatcaagaccactaccccagcaccgaggccacccaccccggctcctaccatcgcctcccagcctctgtccctgcgtccggaggcatgtagacccgcagctggtggggccgtgcatacccggggtcttgacttcgcctgcgatatctacatttgggcccctctggctggtacttgcggggtcctgctgctttcactcgtgatcactctttactgtaagcgcggtcggaagaagctgctgtacatctttaagcaacccttcatgaggcctgtgcagactactcaagaggaggacggctgttcatgccggttcccagaggaggaggaaggcggctgcgaactgcgcgtgaaattcagccgcagcgcagatgctccagcctaccagcaggggcagaaccagctctacaacgaactcaatcttggtcggagagaggagtacgacgtgctggacaagcggagaggacgggacccagaaatgggcgggaagccgcgcagaaagaatccccaagagggcctgtacaacgagctccaaaaggataagatggcagaagcctatagcgagattggtatgaaaggggaacgcagaagaggcaaaggccacgacggactgtaccagggactcagcaccgccaccaaggacacctatgacgctcttcacatgcaggccctgccgcctcgg

SEQ ID NO: 165 - protein, 748 aa, Artificial Sequence
  source: /note="Description of Artificial Sequence: Synthetic polypeptide"
MALPVTALLLPLALLLHAARPRSSLALSLTADQMVSALLDAEPPILYSEYDPTRPFSEASMMGLLTNLADRELVHMINWAKRVPGFVDLALHDQVHLLECAWMEILMIGLVWRSMEHPGKLLFAPNLLLDRNQGKCVEGGVEIFDMLLATSSRFRMMNLQGEEFVCLKSIILLNSGVYTFLSSTLKSLEEKDHIHRVLDKITDTLIHLMAKAGLTLQQQHQRLAQLLLILSHIRHMSSKRMEHLYSMKCKNVVPLSDLLLEMLDAHRLGTGAEDPRPSRKRRQVQLVQSGAEVKKPGASVKVSCKASGYTFTGYYMHWVRQAPGQGLEWMGWINPNSGGTNYAQKFQGRVTLTRDTSISTVYMELSRLRSDDTAVYYCARDMNILATVPFDIWGQGTMVTVSSGGGGSGGGGSGGGGSDIQMTQSPSSLSASVGDRVTITCRASQSISSYLNWYQQKPGKAPKLLIYAASSLQSGVPSRFSGSGSGTDFTLTVNSLQPEDFATYYCQQGDSVPLTFGGGTRLEIKTTTPAPRPPTPAPTIASQPLSLRPEACRPAAGGAVHTRGLDFACDIYIWAPLAGTCGVLLLSLVITLYCKRGRKKLLYIFKQPFMRPVQTTQEEDGCSCRFPEEEEGGCELRVKFSRSADAPAYQQGQNQLYNELNLGRREEYDVLDKRRGRDPEMGGKPRRKNPQEGLYNELQKDKMAEAYSEIGMKGERRRGKGHDGLYQGLSTATKDTYDALHMQALPPR

SEQ ID NO: 166 - DNA, 2244 bp, Artificial Sequence
  source: /note="Description of Artificial Sequence: Synthetic polynucleotide"
atggccctccctgtcaccgccctgctgcttccgctggctcttctgctccacgccgctcggccccggtcgtcgttggcactttccctgactgccgaccagatggtgtccgcccttctggacgccgagcctccaattctgtactcggagtacgatccgactcgcccgttctccgaagccagcatgatgggcctgttgactaacctggcggaccgcgagttggtgcacatgattaactgggctaagcgggtgccgggcttcgtggacctggccctgcacgaccaagtgcacctcctggaatgcgcctggatggaaatcctcatgatcggcctcgtgtggagatccatggagcatcccggaaagctcctgtttgcacccaacctcctgcttgatcgcaaccagggaaaatgcgtggaagggggtgtcgagattttcgacatgctgctcgccacctcttcccggttccggatgatgaatctgcagggagaagagttcgtgtgtctgaagtcaatcatcctgctgaactccggggtctataccttcctgagctcgaccctcaagtcactggaggaaaaagaccacatccatcgcgtgctcgataagatcaccgacacccttatccatctcatggcgaaggctggactgaccctgcaacagcagcaccagaggctggcccagttgctgctgattctgagccacatccggcacatgtcgtccaagaggatggaacacctgtacagcatgaagtgcaagaacgtcgtgcctctgtccgatctgctcctggaaatgctggacgcgcacagactcggaaccggcgcggaagacccccggccctccaggaagcgaaggcaagtgcaactcgtccaaagcggagcggaagtcaagaaacccggagcgagcgtgaaagtgtcctgcaaagcctccggctacacctttacgggctactacatgcactgggtgcgccaggcaccaggacagggtcttgaatggatgggatggatcaaccctaattcgggcggaactaactacgcacagaagttccaggggagagtgactctgactcgggatacctccatctcaactgtctacatggaactctcccgcttgcggtcagatgatacggcagtgtactactgcgcccgcgacatgaatatcctggctaccgtgccgttcgacatctggggacaggggactatggttactgtctcatcgggcggtggaggttcaggaggaggcggctcgggaggcggaggttcggacattcagatgacccagtccccatcctctctgtcggccagcgtcggagatagggtgaccattacctgtcgggcctcgcaaagcatctcctcgtacctcaactggtatcagcaaaagccgggaaaggcgcctaagctgctgatctacgccgcttcgagcttgcaaagcggggtgccatccagattctcgggatcaggctcaggaaccgacttcaccctgaccgtgaacagcctccagccggaggactttgccacttactactgccagcagggagactccgtgccgcttactttcggggggggtacccgcctggagatcaagaccactaccccagcaccgaggccacccaccccggctcctaccatcgcctcccagcctctgtccctgcgtccggaggcatgtagacccgcagctggtggggccgtgcatacccggggtcttgacttcgcctgcgatatctacatttgggcccctctggctggtacttgcggggtcctgctgctttcactcgtgatcactctttactgtaagcgcggtcggaagaagctgctgtacatctttaagcaacccttcatgaggcctgtgcagactactcaagaggaggacggctgttcatgccggttcccagaggaggaggaaggcggctgcgaactgcgcgtgaaattcagccgcagcgcagatgctccagcctaccagcaggggcagaaccagctctacaacgaactcaatcttggtcggagagaggagtacgacgtgctggacaagcggagaggacgggacccagaaatgggcgggaagccgcgcagaaagaatccccaagagggcctgtacaacgagctccaaaaggataagatggcagaagcctatagcgagattggtatgaaaggggaacgcagaagaggcaaaggccacgacggactgtaccagggactcagcaccgccaccaaggacacctatgacgctcttcacatgcaggccctgccgcctcgg

SEQ ID NO: 167 - protein, 738 aa, Artificial Sequence
  source: /note="Description of Artificial Sequence: Synthetic polypeptide"
MALPVTALLLPLALLLHAARPRSSLALSLTADQMVSALLDAEPPILYSEYDPTRPFSEASMMGLLTNLADRELVHMINWAKRVPGFVDLTLHDQVHLLECAWMEILMIGLVWRSMEHPGKLLFAPNLLLDRNQGKCVEGGVEIFDMLLATSSRFRMMNLQGEEFVCLKSIILLNSGVYTFLSSTLKSLEEKDHIHRVLDKITDTLIHLMAKAGLTLQQQHQRLAQLLLILSHIRHMSNKRMEHLYSMKCKNVVPLSDLLLEMLDAHRLRTKRQVQLVQSGAEVKKPGASVKVSCKASGYTFTGYYMHWVRQAPGQGLEWMGWINPNSGGTNYAQKFQGRVTLTRDTSISTVYMELSRLRSDDTAVYYCARDMNILATVPFDIWGQGTMVTVSSGGGGSGGGGSGGGGSDIQMTQSPSSLSASVGDRVTITCRASQSISSYLNWYQQKPGKAPKLLIYAASSLQSGVPSRFSGSGSGTDFTLTVNSLQPEDFATYYCQQGDSVPLTFGGGTRLEIKTTTPAPRPPTPAPTIASQPLSLRPEACRPAAGGAVHTRGLDFACDIYIWAPLAGTCGVLLLSLVITLYCKRGRKKLLYIFKQPFMRPVQTTQEEDGCSCRFPEEEEGGCELRVKFSRSADAPAYQQGQNQLYNELNLGRREEYDVLDKRRGRDPEMGGKPRRKNPQEGLYNELQKDKMAEAYSEIGMKGERRRGKGHDGLYQGLSTATKDTYDALHMQALPPR

SEQ ID NO: 168 - DNA, 2214 bp, Artificial Sequence
  source: /note="Description of Artificial Sequence: Synthetic polynucleotide"
atggccctccctgtcaccgccctgctgcttccgctggctcttctgctccacgccgctcggccccggtcgtcgttggcactttccctgactgccgaccagatggtgtccgcccttctggacgccgagcctccaattctgtactcggagtacgatccgactcgcccgttctccgaagccagcatgatgggcctgttgactaacctggcggaccgcgagttggtgcacatgattaactgggctaagcgggtgccgggcttcgtggacctgaccctgcacgaccaagtgcacctcctggaatgcgcctggatggaaatcctcatgatcggcctcgtgtggagatccatggagcatcccggaaagctcctgtttgcacccaacctcctgcttgatcgcaaccagggaaaatgcgtggaagggggtgtcgagattttcgacatgctgctcgccacctcttcccggttccggatgatgaatctgcagggagaagagttcgtgtgtctgaagtcaatcatcctgctgaactccggggtctataccttcctgagctcgaccctcaagtcactggaggaaaaagaccacatccatcgcgtgctcgataagatcaccgacacccttatccatctcatggcgaaggctggactgaccctgcaacagcagcaccagaggctggcccagttgctgctgattctgagccacatccggcacatgtcgaacaagaggatggaacacctgtacagcatgaagtgcaagaacgtcgtgcctctgtccgatctgctcctggaaatgctggacgcgcacagactccgtactaaaagacaagtgcaactcgtccaaagcggagcggaagtcaagaaacccggagcgagcgtgaaagtgtcctgcaaagcctccggctacacctttacgggctactacatgcactgggtgcgccaggcaccaggacagggtcttgaatggatgggatggatcaaccctaattcgggcggaactaactacgcacagaagttccaggggagagtgactctgactcgggatacctccatctcaactgtctacatggaactctcccgcttgcggtcagatgatacggcagtgtactactgcgcccgcgacatgaatatcctggctaccgtgccgttcgacatctggggacaggggactatggttactgtctcatcgggcggtggaggttcaggaggaggcggctcgggaggcggaggttcggacattcagatgacccagtccccatcctctctgtcggccagcgtcggagatagggtgaccattacctgtcgggcctcgcaaagcatctcctcgtacctcaactggtatcagcaaaagccgggaaaggcgcctaagctgctgatctacgccgcttcgagcttgcaaagcggggtgccatccagattctcgggatcaggctcaggaaccgacttcaccctgaccgtgaacagcctccagccggaggactttgccacttactactgccagcagggagactccgtgccgcttactttcggggggggtacccgcctggagatcaagaccactaccccagcaccgaggccacccaccccggctcctaccatcgcctcccagcctctgtccctgcgtccggaggcatgtagacccgcagctggtggggccgtgcatacccggggtcttgacttcgcctgcgatatctacatttgggcccctctggctggtacttgcggggtcctgctgctttcactcgtgatcactctttactgtaagcgcggtcggaagaagctgctgtacatctttaagcaacccttcatgaggcctgtgcagactactcaagaggaggacggctgttcatgccggttcccagaggaggaggaaggcggctgcgaactgcgcgtgaaattcagccgcagcgcagatgctccagcctaccagcaggggcagaaccagctctacaacgaactcaatcttggtcggagagaggagtacgacgtgctggacaagcggagaggacgggacccagaaatgggcgggaagccgcgcagaaagaatccccaagagggcctgtacaacgagctccaaaaggataagatggcagaagcctatagcgagattggtatgaaaggggaacgcagaagaggcaaaggccacgacggactgtaccagggactcagcaccgccaccaaggacacctatgacgctcttcacatgcaggccctgccgcctcgg

SEQ ID NO: 169 - protein, 754 aa, Artificial Sequence
  source: /note="Description of Artificial Sequence: Synthetic polypeptide"
MALPVTALLLPLALLLHAARPRSSLALSLTADQMVSALLDAEPPILYSEYDPTRPFSEASMMGLLTNLADRELVHMINWAKRVPGFVDLTLHDQVHLLECAWMEILMIGLVWRSMEHPGKLLFAPNLLLDRNQGKCVEGGVEIFDMLLATSSRFRMMNLQGEEFVCLKSIILLNSGVYTFLSSTLKSLEEKDHIHRVLDKITDTLIHLMAKAGLTLQQQHQRLAQLLLILSHIRHMSNKRMEHLYSMKCKNVVPLSDLLLEMLDAHRLGTGAEDPRPSRKRRSLGDVGQVQLVQSGAEVKKPGASVKVSCKASGYTFTGYYMHWVRQAPGQGLEWMGWINPNSGGTNYAQKFQGRVTLTRDTSISTVYMELSRLRSDDTAVYYCARDMNILATVPFDIWGQGTMVTVSSGGGGSGGGGSGGGGSDIQMTQSPSSLSASVGDRVTITCRASQSISSYLNWYQQKPGKAPKLLIYAASSLQSGVPSRFSGSGSGTDFTLTVNSLQPEDFATYYCQQGDSVPLTFGGGTRLEIKTTTPAPRPPTPAPTIASQPLSLRPEACRPAAGGAVHTRGLDFACDIYIWAPLAGTCGVLLLSLVITLYCKRGRKKLLYIFKQPFMRPVQTTQEEDGCSCRFPEEEEGGCELRVKFSRSADAPAYQQGQNQLYNELNLGRREEYDVLDKRRGRDPEMGGKPRRKNPQEGLYNELQKDKMAEAYSEIGMKGERRRGKGHDGLYQGLSTATKDTYDALHMQALPPR

SEQ ID NO: 170 - DNA, 2262 bp, Artificial Sequence
  source: /note="Description of Artificial Sequence: Synthetic polynucleotide"
atggccctccctgtcaccgccctgctgcttccgctggctcttctgctccacgccgctcggccccggtcgtcgttggcactttccctgactgccgaccagatggtgtccgcccttctggacgccgagcctccaattctgtactcggagtacgatccgactcgcccgttctccgaagccagcatgatgggcctgttgactaacctggcggaccgcgagttggtgcacatgattaactgggctaagcgggtgccgggcttcgtggacctgaccctgcacgaccaagtgcacctcctggaatgcgcctggatggaaatcctcatgatcggcctcgtgtggagatccatggagcatcccggaaagctcctgtttgcacccaacctcctgcttgatcgcaaccagggaaaatgcgtggaagggggtgtcgagattttcgacatgctgctcgccacctcttcccggttccggatgatgaatctgcagggagaagagttcgtgtgtctgaagtcaatcatcctgctgaactccggggtctataccttcctgagctcgaccctcaagtcactggaggaaaaagaccacatccatcgcgtgctcgataagatcaccgacacccttatccatctcatggcgaaggctggactgaccctgcaacagcagcaccagaggctggcccagttgctgctgattctgagccacatccggcacatgtcgaacaagaggatggaacacctgtacagcatgaagtgcaagaacgtcgtgcctctgtccgatctgctcctggaaatgctggacgcgcacagactcggaaccggcgcggaagacccccggccctccaggaagcgaaggtccctcggagacgtgggtcaagtgcaactcgtccaaagcggagcggaagtcaagaaacccggagcgagcgtgaaagtgtcctgcaaagcctccggctacacctttacgggctactacatgcactgggtgcgccaggcaccaggacagggtcttgaatggatgggatggatcaaccctaattcgggcggaactaactacgcacagaagttccaggggagagtgactctgactcgggatacctccatctcaactgtctacatggaactctcccgcttgcggtcagatgatacggcagtgtactactgcgcccgcgacatgaatatcctggctaccgtgccgttcgacatctggggacaggggactatggttactgtctcatcgggcggtggaggttcaggaggaggcggctcgggaggcggaggttcggacattcagatgacccagtccccatcctctctgtcggccagcgtcggagatagggtgaccattacctgtcgggcctcgcaaagcatctcctcgtacctcaactggtatcagcaaaagccgggaaaggcgcctaagctgctgatctacgccgcttcgagcttgcaaagcggggtgccatccagattctcgggatcaggctcaggaaccgacttcaccctgaccgtgaacagcctccagccggaggactttgccacttactactgccagcagggagactccgtgccgcttactttcggggggggtacccgcctggagatcaagaccactaccccagcaccgaggccacccaccccggctcctaccatcgcctcccagcctctgtccctgcgtccggaggcatgtagacccgcagctggtggggccgtgcatacccggggtcttgacttcgcctgcgatatctacatttgggcccctctggctggtacttgcggggtcctgctgctttcactcgtgatcactctttactgtaagcgcggtcggaagaagctgctgtacatctttaagcaacccttcatgaggcctgtgcagactactcaagaggaggacggctgttcatgccggttcccagaggaggaggaaggcggctgcgaactgcgcgtgaaattcagccgcagcgcagatgctccagcctaccagcaggggcagaaccagctctacaacgaactcaatcttggtcggagagaggagtacgacgtgctggacaagcggagaggacgggacccagaaatgggcgggaagccgcgcagaaagaatccccaagagggcctgtacaacgagctccaaaaggataagatggcagaagcctatagcgagattggtatgaaaggggaacgcagaagaggcaaaggccacgacggactgtaccagggactcagcaccgccaccaaggacacctatgacgctcttcacatgcaggccctgccgcctcgg

SEQ ID NO: 171 - protein, 748 aa, Artificial Sequence
  source: /note="Description of Artificial Sequence: Synthetic polypeptide"
MALPVTALLLPLALLLHAARPRSSLALSLTADQMVSALLDAEPPILYSEYDPTRPFSEASMMGLLTNLADRELVHMINWAKRVPGFVDLTLHDQVHLLECAWMEILMIGLVWRSMEHPGKLLFAPNLLLDRNQGKCVEGGVEIFDMLLATSSRFRMMNLQGEEFVCLKSIILLNSGVYTFLSSTLKSLEEKDHIHRVLDKITDTLIHLMAKAGLTLQQQHQRLAQLLLILSHIRHMSNKRMEHLYSMKCKNVVPLSDLLLEMLDAHRLGTGAEDPRPSRKRRQVQLVQSGAEVKKPGASVKVSCKASGYTFTGYYMHWVRQAPGQGLEWMGWINPNSGGTNYAQKFQGRVTLTRDTSISTVYMELSRLRSDDTAVYYCARDMNILATVPFDIWGQGTMVTVSSGGGGSGGGGSGGGGSDIQMTQSPSSLSASVGDRVTITCRASQSISSYLNWYQQKPGKAPKLLIYAASSLQSGVPSRFSGSGSGTDFTLTVNSLQPEDFATYYCQQGDSVPLTFGGGTRLEIKTTTPAPRPPTPAPTIASQPLSLRPEACRPAAGGAVHTRGLDFACDIYIWAPLAGTCGVLLLSLVITLYCKRGRKKLLYIFKQPFMRPVQTTQEEDGCSCRFPEEEEGGCELRVKFSRSADAPAYQQGQNQLYNELNLGRREEYDVLDKRRGRDPEMGGKPRRKNPQEGLYNELQKDKMAEAYSEIGMKGERRRGKGHDGLYQGLSTATKDTYDALHMQALPPR

SEQ ID NO: 172 - DNA, 2244 bp, Artificial Sequence
  source: /note="Description of Artificial Sequence: Synthetic polynucleotide"
atggccctccctgtcaccgccctgctgcttccgctggctcttctgctccacgccgctcggccccggtcgtcgttggcactttccctgactgccgaccagatggtgtccgcccttctggacgccgagcctccaattctgtactcggagtacgatccgactcgcccgttctccgaagccagcatgatgggcctgttgactaacctggcggaccgcgagttggtgcacatgattaactgggctaagcgggtgccgggcttcgtggacctgaccctgcacgaccaagtgcacctcctggaatgcgcctggatggaaatcctcatgatcggcctcgtgtggagatccatggagcatcccggaaagctcctgtttgcacccaacctcctgcttgatcgcaaccagggaaaatgcgtggaagggggtgtcgagattttcgacatgctgctcgccacctcttcccggttccggatgatgaatctgcagggagaagagttcgtgtgtctgaagtcaatcatcctgctgaactccggggtctataccttcctgagctcgaccctcaagtcactggaggaaaaagaccacatccatcgcgtgctcgataagatcaccgacacccttatccatctcatggcgaaggctggactgaccctgcaacagcagcaccagaggctggcccagttgctgctgattctgagccacatccggcacatgtcgaacaagaggatggaacacctgtacagcatgaagtgcaagaacgtcgtgcctctgtccgatctgctcctggaaatgctggacgcgcacagactcgggacgggagctgaagatccacgacccagcagaaagcgacggcaagtgcaactcgtccaaagcggagcggaagtcaagaaacccggagcgagcgtgaaagtgtcctgcaaagcctccggctacacctttacgggctactacatgcactgggtgcgccaggcaccaggacagggtcttgaatggatgggatggatcaaccctaattcgggcggaactaactacgcacagaagttccaggggagagtgactctgactcgggatacctccatctcaactgtctacatggaactctcccgcttgcggtcagatgatacggcagtgtactactgcgcccgcgacatgaatatcctggctaccgtgccgttcgacatctggggacaggggactatggttactgtctcatcgggcggtggaggttcaggaggaggcggctcgggaggcggaggttcggacattcagatgacccagtccccatcctctctgtcggccagcgtcggagatagggtgaccattacctgtcgggcctcgcaaagcatctcctcgtacctcaactggtatcagcaaaagccgggaaaggcgcctaagctgctgatctacgccgcttcgagcttgcaaagcggggtgccatccagattctcgggatcaggctcaggaaccgacttcaccctgaccgtgaacagcctccagccggaggactttgccacttactactgccagcagggagactccgtgccgcttactttcggggggggtacccgcctggagatcaagaccactaccccagcaccgaggccacccaccccggctcctaccatcgcctcccagcctctgtccctgcgtccggaggcatgtagacccgcagctggtggggccgtgcatacccggggtcttgacttcgcctgcgatatctacatttgggcccctctggctggtacttgcggggtcctgctgctttcactcgtgatcactctttactgtaagcgcggtcggaagaagctgctgtacatctttaagcaacccttcatgaggcctgtgcagactactcaagaggaggacggctgttcatgccggttcccagaggaggaggaaggcggctgcgaactgcgcgtgaaattcagccgcagcgcagatgctccagcctaccagcaggggcagaaccagctctacaacgaactcaatcttggtcggagagaggagtacgacgtgctggacaagcggagaggacgggacccagaaatgggcgggaagccgcgcagaaagaatccccaagagggcctgtacaacgagctccaaaaggataagatggcagaagcctatagcgagattggtatgaaaggggaacgcagaagaggcaaaggccacgacggactgtaccagggactcagcaccgccaccaaggacacctatgacgctcttcacatgcaggccctgccgcctcgg

SEQ ID NO: 173 - protein, 734 aa, Artificial Sequence
  source: /note="Description of Artificial Sequence: Synthetic polypeptide"
MALPVTALLLPLALLLHAARPRSSLALSLTADQMVSALLDAEPPILYSEYDPTRPFSEASMMGLLTNLADRELVHMINWAKRVPGFVDLALHDQVHLLECAWMEILMIGLVWRSMEHPGKLLFAPNLLLDRNQGKCVEGGVEIFDMLLATSSRFRMMNLQGEEFVCLKSIILLNSGVYTFLSSTLKSLEEKDHIHRVLDKITDTLIHLMAKAGLTLQQQHQRLAQLLLILSHIRHMSSKRMEHLYSMKCKNVVPLSDLLLEMLDAHRLRTKREVQLVESGGGLVQPGGSLRLSCAVSGFALSNHGMSWVRRAPGKGLEWVSGIVYSGSTYYAASVKGRFTISRDNSRNTLYLQMNSLRPEDTAIYYCSAHGGESDVWGQGTTVTVSSASGGGGSGGRASGGGGSDIQLTQSPSSLSASVGDRVTITCRASQSISSYLNWYQQKPGKAPKLLIYAASSLQSGVPSRFSGSGSGTDFTLTISSLQPEDFATYYCQQSYSTPYTFGQGTKVEIKTTTPAPRPPTPAPTIASQPLSLRPEACRPAAGGAVHTRGLDFACDIYIWAPLAGTCGVLLLSLVITLYCKRGRKKLLYIFKQPFMRPVQTTQEEDGCSCRFPEEEEGGCELRVKFSRSADAPAYQQGQNQLYNELNLGRREEYDVLDKRRGRDPEMGGKPRRKNPQEGLYNELQKDKMAEAYSEIGMKGERRRGKGHDGLYQGLSTATKDTYDALHMQALPPR

SEQ ID NO: 174 - DNA, 2202 bp, Artificial Sequence
  source: /note="Description of Artificial Sequence: Synthetic polynucleotide"
atggccctccctgtcaccgccctgctgcttccgctggctcttctgctccacgccgctcggccccggtcgtcgttggcactttccctgactgccgaccagatggtgtccgcccttctggacgccgagcctccaattctgtactcggagtacgatccgactcgcccgttctccgaagccagcatgatgggcctgttgactaacctggcggaccgcgagttggtgcacatgattaactgggctaagcgggtgccgggcttcgtggacctggccctgcacgaccaagtgcacctcctggaatgcgcctggatggaaatcctcatgatcggcctcgtgtggagatccatggagcatcccggaaagctcctgtttgcacccaacctcctgcttgatcgcaaccagggaaaatgcgtggaagggggtgtcgagattttcgacatgctgctcgccacctcttcccggttccggatgatgaatctgcagggagaagagttcgtgtgtctgaagtcaatcatcctgctgaactccggggtctataccttcctgagctcgaccctcaagtcactggaggaaaaagaccacatccatcgcgtgctcgataagatcaccgacacccttatccatctcatggcgaaggctggactgaccctgcaacagcagcaccagaggctggcccagttgctgctgattctgagccacatccggcacatgtcgtccaagaggatggaacacctgtacagcatgaagtgcaagaacgtcgtgcctctgtccgatctgctcctggaaatgctggacgcgcacagactccgtactaaaagagaagtgcaattggtggaatcagggggaggacttgtgcagcctggaggatcgctgagactgtcatgtgccgtgtccggctttgccctgtccaaccacgggatgtcctgggtccgccgcgcgcctggaaagggcctcgaatgggtgtcgggtattgtgtacagcggtagcacctactatgccgcatccgtgaaggggagattcaccatcagccgggacaactccaggaacactctgtacctccaaatgaattcgctgaggccagaggacactgccatctactactgctccgcgcatggcggagagtccgacgtctggggacaggggaccaccgtgaccgtgtctagcgcgtccggcggaggcggcagcgggggtcgggcatcagggggcggcggatcggacatccagctcacccagtccccgagctcgctgtccgcctccgtgggagatcgggtcaccatcacgtgccgcgccagccagtcgatttcctcctacctgaactggtaccaacagaagcccggaaaagccccgaagcttctcatctacgccgcctcgagcctgcagtcaggagtgccctcacggttctccggctccggttccggtactgatttcaccctgaccatttcctccctgcaaccggaggacttcgctacttactactgccagcagtcgtactccaccccctacactttcggacaaggcaccaaggtcgaaatcaagaccactaccccagcaccgaggccacccaccccggctcctaccatcgcctcccagcctctgtccctgcgtccggaggcatgtagacccgcagctggtggggccgtgcatacccggggtcttgacttcgcctgcgatatctacatttgggcccctctggctggtacttgcggggtcctgctgctttcactcgtgatcactctttactgtaagcgcggtcggaagaagctgctgtacatctttaagcaacccttcatgaggcctgtgcagactactcaagaggaggacggctgttcatgccggttcccagaggaggaggaaggcggctgcgaactgcgcgtgaaattcagccgcagcgcagatgctccagcctaccagcaggggcagaaccagctctacaacgaactcaatcttggtcggagagaggagtacgacgtgctggacaagcggagaggacgggacccagaaatgggcgggaagccgcgcagaaagaatccccaagagggcctgtacaacgagctccaaaaggataagatggcagaagcctatagcgagattggtatgaaaggggaacgcagaagaggcaaaggccacgacggactgtaccagggactcagcaccgccaccaaggacacctatgacgctcttcacatgcaggccctgccgcctcgg

SEQ ID NO: 175 - protein, 750 aa, Artificial Sequence
  source: /note="Description of Artificial Sequence: Synthetic polypeptide"
MALPVTALLLPLALLLHAARPRSSLALSLTADQMVSALLDAEPPILYSEYDPTRPFSEASMMGLLTNLADRELVHMINWAKRVPGFVDLALHDQVHLLECAWMEILMIGLVWRSMEHPGKLLFAPNLLLDRNQGKCVEGGVEIFDMLLATSSRFRMMNLQGEEFVCLKSIILLNSGVYTFLSSTLKSLEEKDHIHRVLDKITDTLIHLMAKAGLTLQQQHQRLAQLLLILSHIRHMSSKRMEHLYSMKCKNVVPLSDLLLEMLDAHRLGTGAEDPRPSRKRRSLGDVGEVQLVESGGGLVQPGGSLRLSCAVSGFALSNHGMSWVRRAPGKGLEWVSGIVYSGSTYYAASVKGRFTISRDNSRNTLYLQMNSLRPEDTAIYYCSAHGGESDVWGQGTTVTVSSASGGGGSGGRASGGGGSDIQLTQSPSSLSASVGDRVTITCRASQSISSYLNWYQQKPGKAPKLLIYAASSLQSGVPSRFSGSGSGTDFTLTISSLQPEDFATYYCQQSYSTPYTFGQGTKVEIKTTTPAPRPPTPAPTIASQPLSLRPEACRPAAGGAVHTRGLDFACDIYIWAPLAGTCGVLLLSLVITLYCKRGRKKLLYIFKQPFMRPVQTTQEEDGCSCRFPEEEEGGCELRVKFSRSADAPAYQQGQNQLYNELNLGRREEYDVLDKRRGRDPEMGGKPRRKNPQEGLYNELQKDKMAEAYSEIGMKGERRRGKGHDGLYQGLSTATKDTYDALHMQALPPR

SEQ ID NO: 176 - DNA, 2250 bp, Artificial Sequence
  source: /note="Description of Artificial Sequence: Synthetic polynucleotide"
atggccctccctgtcaccgccctgctgcttccgctggctcttctgctccacgccgctcggccccggtcgtcgttggcactttccctgactgccgaccagatggtgtccgcccttctggacgccgagcctccaattctgtactcggagtacgatccgactcgcccgttctccgaagccagcatgatgggcctgttgactaacctggcggaccgcgagttggtgcacatgattaactgggctaagcgggtgccgggcttcgtggacctggccctgcacgaccaagtgcacctcctggaatgcgcctggatggaaatcctcatgatcggcctcgtgtggagatccatggagcatcccggaaagctcctgtttgcacccaacctcctgcttgatcgcaaccagggaaaatgcgtggaagggggtgtcgagattttcgacatgctgctcgccacctcttcccggttccggatgatgaatctgcagggagaagagttcgtgtgtctgaagtcaatcatcctgctgaactccggggtctataccttcctgagctcgaccctcaagtcactggaggaaaaagaccacatccatcgcgtgctcgataagatcaccgacacccttatccatctcatggcgaaggctggactgaccctgcaacagcagcaccagaggctggcccagttgctgctgattctgagccacatccggcacatgtcgtccaagaggatggaacacctgtacagcatgaagtgcaagaacgtcgtgcctctgtccgatctgctcctggaaatgctggacgcgcacagactcggaaccggcgcggaagacccccggccctccaggaagcgaaggtccctcggagacgtgggtgaagtgcaattggtggaatcagggggaggacttgtgcagcctggaggatcgctgagactgtcatgtgccgtgtccggctttgccctgtccaaccacgggatgtcctgggtccgccgcgcgcctggaaagggcctcgaatgggtgtcgggtattgtgtacagcggtagcacctactatgccgcatccgtgaaggggagattcaccatcagccgggacaactccaggaacactctgtacctccaaatgaattcgctgaggccagaggacactgccatctactactgctccgcgcatggcggagagtccgacgtctggggacaggggaccaccgtgaccgtgtctagcgcgtccggcggaggcggcagcgggggtcgggcatcagggggcggcggatcggacatccagctcacccagtccccgagctcgctgtccgcctccgtgggagatcgggtcaccatcacgtgccgcgccagccagtcgatttcctcctacctgaactggtaccaacagaagcccggaaaagccccgaagcttctcatctacgccgcctcgagcctgcagtcaggagtgccctcacggttctccggctccggttccggtactgatttcaccctgaccatttcctccctgcaaccggaggacttcgctacttactactgccagcagtcgtactccaccccctacactttcggacaaggcaccaaggtcgaaatcaagaccactaccccagcaccgaggccacccaccccggctcctaccatcgcctcccagcctctgtccctgcgtccggaggcatgtagacccgcagctggtggggccgtgcatacccggggtcttgacttcgcctgcgatatctacatttgggcccctctggctggtacttgcggggtcctgctgctttcactcgtgatcactctttactgtaagcgcggtcggaagaagctgctgtacatctttaagcaacccttcatgaggcctgtgcagactactcaagaggaggacggctgttcatgccggttcccagaggaggaggaaggcggctgcgaactgcgcgtgaaattcagccgcagcgcagatgctccagcctaccagcaggggcagaaccagctctacaacgaactcaatcttggtcggagagaggagtacgacgtgctggacaagcggagaggacgggacccagaaatgggcgggaagccgcgcagaaagaatccccaagagggcctgtacaacgagctccaaaaggataagatggcagaagcctatagcgagattggtatgaaaggggaacgcagaagaggcaaaggccacgacggactgtaccagggactcagcaccgccaccaaggacacctatgacgctcttcacatgcaggccctgccgcctcgg

SEQ ID NO: 177 - protein, 744 aa, Artificial Sequence
  source: /note="Description of Artificial Sequence: Synthetic polypeptide"
MALPVTALLLPLALLLHAARPRSSLALSLTADQMVSALLDAEPPILYSEYDPTRPFSEASMMGLLTNLADRELVHMINWAKRVPGFVDLALHDQVHLLECAWMEILMIGLVWRSMEHPGKLLFAPNLLLDRNQGKCVEGGVEIFDMLLATSSRFRMMNLQGEEFVCLKSIILLNSGVYTFLSSTLKSLEEKDHIHRVLDKITDTLIHLMAKAGLTLQQQHQRLAQLLLILSHIRHMSSKRMEHLYSMKCKNVVPLSDLLLEMLDAHRLGTGAEDPRPSRKRREVQLVESGGGLVQPGGSLRLSCAVSGFALSNHGMSWVRRAPGKGLEWVSGIVYSGSTYYAASVKGRFTISRDNSRNTLYLQMNSLRPEDTAIYYCSAHGGESDVWGQGTTVTVSSASGGGGSGGRASGGGGSDIQLTQSPSSLSASVGDRVTITCRASQSISSYLNWYQQKPGKAPKLLIYAASSLQSGVPSRFSGSGSGTDFTLTISSLQPEDFATYYCQQSYSTPYTFGQGTKVEIKTTTPAPRPPTPAPTIASQPLSLRPEACRPAAGGAVHTRGLDFACDIYIWAPLAGTCGVLLLSLVITLYCKRGRKKLLYIFKQPFMRPVQTTQEEDGCSCRFPEEEEGGCELRVKFSRSADAPAYQQGQNQLYNELNLGRREEYDVLDKRRGRDPEMGGKPRRKNPQEGLYNELQKDKMAEAYSEIGMKGERRRGKGHDGLYQGLSTATKDTYDALHMQALPPR

SEQ ID NO: 178 - DNA, 2232 bp, Artificial Sequence
  source: /note="Description of Artificial Sequence: Synthetic polynucleotide"
atggccctccctgtcaccgccctgctgcttccgctggctcttctgctccacgccgctcggccccggtcgtcgttggcactttccctgactgccgaccagatggtgtccgcccttctggacgccgagcctccaattctgtactcggagtacgatccgactcgcccgttctccgaagccagcatgatgggcctgttgactaacctggcggaccgcgagttggtgcacatgattaactgggctaagcgggtgccgggcttcgtggacctggccctgcacgaccaagtgcacctcctggaatgcgcctggatggaaatcctcatgatcggcctcgtgtggagatccatggagcatcccggaaagctcctgtttgcacccaacctcctgcttgatcgcaaccagggaaaatgcgtggaagggggtgtcgagattttcgacatgctgctcgccacctcttcccggttccggatgatgaatctgcagggagaagagttcgtgtgtctgaagtcaatcatcctgctgaactccggggtctataccttcctgagctcgaccctcaagtcactggaggaaaaagaccacatccatcgcgtgctcgataagatcaccgacacccttatccatctcatggcgaaggctggactgaccctgcaacagcagcaccagaggctggcccagttgctgctgattctgagccacatccggcacatgtcgtccaagaggatggaacacctgtacagcatgaagtgcaagaacgtcgtgcctctgtccgatctgctcctggaaatgctggacgcgcacagactcgggacgggagctgaagatccacgacccagcagaaagcgacgggaagtgcaattggtggaatcagggggaggacttgtgcagcctggaggatcgctgagactgtcatgtgccgtgtccggctttgccctgtccaaccacgggatgtcctgggtccgccgcgcgcctggaaagggcctcgaatgggtgtcgggtattgtgtacagcggtagcacctactatgccgcatccgtgaaggggagattcaccatcagccgggacaactccaggaacactctgtacctccaaatgaattcgctgaggccagaggacactgccatctactactgctccgcgcatggcggagagtccgacgtctggggacaggggaccaccgtgaccgtgtctagcgcgtccggcggaggcggcagcgggggtcgggcatcagggggcggcggatcggacatccagctcacccagtccccgagctcgctgtccgcctccgtgggagatcgggtcaccatcacgtgccgcgccagccagtcgatttcctcctacctgaactggtaccaacagaagcccggaaaagccccgaagcttctcatctacgccgcctcgagcctgcagtcaggagtgccctcacggttctccggctccggttccggtactgatttcaccctgaccatttcctccctgcaaccggaggacttcgctacttactactgccagcagtcgtactccaccccctacactttcggacaaggcaccaaggtcgaaatcaagaccactaccccagcaccgaggccacccaccccggctcctaccatcgcctcccagcctctgtccctgcgtccggaggcatgtagacccgcagctggtggggccgtgcatacccggggtcttgacttcgcctgcgatatctacatttgggcccctctggctggtacttgcggggtcctgctgctttcactcgtgatcactctttactgtaagcgcggtcggaagaagctgctgtacatctttaagcaacccttcatgaggcctgtgcagactactcaagaggaggacggctgttcatgccggttcccagaggaggaggaaggcggctgcgaactgcgcgtgaaattcagccgcagcgcagatgctccagcctaccagcaggggcagaaccagctctacaacgaactcaatcttggtcggagagaggagtacgacgtgctggacaagcggagaggacgggacccagaaatgggcgggaagccgcgcagaaagaatccccaagagggcctgtacaacgagctccaaaaggataagatggcagaagcctatagcgagattggtatgaaaggggaacgcagaagaggcaaaggccacgacggactgtaccagggactcagcaccgccaccaaggacacctatgacgctcttcacatgcaggccctgccgcctcgg

SEQ ID NO: 179 - protein, 734 aa, Artificial Sequence
  source: /note="Description of Artificial Sequence: Synthetic polypeptide"
MALPVTALLLPLALLLHAARPRSSLALSLTADQMVSALLDAEPPILYSEYDPTRPFSEASMMGLLTNLADRELVHMINWAKRVPGFVDLTLHDQVHLLECAWMEILMIGLVWRSMEHPGKLLFAPNLLLDRNQGKCVEGGVEIFDMLLATSSRFRMMNLQGEEFVCLKSIILLNSGVYTFLSSTLKSLEEKDHIHRVLDKITDTLIHLMAKAGLTLQQQHQRLAQLLLILSHIRHMSNKRMEHLYSMKCKNVVPLSDLLLEMLDAHRLRTKREVQLVESGGGLVQPGGSLRLSCAVSGFALSNHGMSWVRRAPGKGLEWVSGIVYSGSTYYAASVKGRFTISRDNSRNTLYLQMNSLRPEDTAIYYCSAHGGESDVWGQGTTVTVSSASGGGGSGGRASGGGGSDIQLTQSPSSLSASVGDRVTITCRASQSISSYLNWYQQKPGKAPKLLIYAASSLQSGVPSRFSGSGSGTDFTLTISSLQPEDFATYYCQQSYSTPYTFGQGTKVEIKTTTPAPRPPTPAPTIASQPLSLRPEACRPAAGGAVHTRGLDFACDIYIWAPLAGTCGVLLLSLVITLYCKRGRKKLLYIFKQPFMRPVQTTQEEDGCSCRFPEEEEGGCELRVKFSRSADAPAYQQGQNQLYNELNLGRREEYDVLDKRRGRDPEMGGKPRRKNPQEGLYNELQKDKMAEAYSEIGMKGERRRGKGHDGLYQGLSTATKDTYDALHMQALPPR

SEQ ID NO: 180 - DNA, 2202 bp, Artificial Sequence
  source: /note="Description of Artificial Sequence: Synthetic polynucleotide"
atggccctccctgtcaccgccctgctgcttccgctggctcttctgctccacgccgctcggccccggtcgtcgttggcactttccctgactgccgaccagatggtgtccgcccttctggacgccgagcctccaattctgtactcggagtacgatccgactcgcccgttctccgaagccagcatgatgggcctgttgactaacctggcggaccgcgagttggtgcacatgattaactgggctaagcgggtgccgggcttcgtggacctgaccctgcacgaccaagtgcacctcctggaatgcgcctggatggaaatcctcatgatcggcctcgtgtggagatccatggagcatcccggaaagctcctgtttgcacccaacctcctgcttgatcgcaaccagggaaaatgcgtggaagggggtgtcgagattttcgacatgctgctcgccacctcttcccggttccggatgatgaatctgcagggagaagagttcgtgtgtctgaagtcaatcatcctgctgaactccggggtctataccttcctgagctcgaccctcaagtcactggaggaaaaagaccacatccatcgcgtgctcgataagatcaccgacacccttatccatctcatggcgaaggctggactgaccctgcaacagcagcaccagaggctggcccagttgctgctgattctgagccacatccggcacatgtcgaacaagaggatggaacacctgtacagcatgaagtgcaagaacgtcgtgcctctgtccgatctgctcctggaaatgctggacgcgcacagactccgtactaaaagagaagtgcaattggtggaatcagggggaggacttgtgcagcctggaggatcgctgagactgtcatgtgccgtgtccggctttgccctgtccaaccacgggatgtcctgggtccgccgcgcgcctggaaagggcctcgaatgggtgtcgggtattgtgtacagcggtagcacctactatgccgcatccgtgaaggggagattcaccatcagccgggacaactccaggaacactctgtacctccaaatgaattcgctgaggccagaggacactgccatctactactgctccgcgcatggcggagagtccgacgtctggggacaggggaccaccgtgaccgtgtctagcgcgtccggcggaggcggcagcgggggtcgggcatcagggggcggcggatcggacatccagctcacccagtccccgagctcgctgtccgcctccgtgggagatcgggtcaccatcacgtgccgcgccagccagtcgatttcctcctacctgaactggtaccaacagaagcccggaaaagccccgaagcttctcatctacgccgcctcgagcctgcagtcaggagtgccctcacggttctccggctccggttccggtactgatttcaccctgaccatttcctccctgcaaccggaggacttcgctacttactactgccagcagtcgtactccaccccctacactttcggacaaggcaccaaggtcgaaatcaagaccactaccccagcaccgaggccacccaccccggctcctaccatcgcctcccagcctctgtccctgcgtccggaggcatgtagacccgcagctggtggggccgtgcatacccggggtcttgacttcgcctgcgatatctacatttgggcccctctggctggtacttgcggggtcctgctgctttcactcgtgatcactctttactgtaagcgcggtcggaagaagctgctgtacatctttaagcaacccttcatgaggcctgtgcagactactcaagaggaggacggctgttcatgccggttcccagaggaggaggaaggcggctgcgaactgcgcgtgaaattcagccgcagcgcagatgctccagcctaccagcaggggcagaaccagctctacaacgaactcaatcttggtcggagagaggagtacgacgtgctggacaagcggagaggacgggacccagaaatgggcgggaagccgcgcagaaagaatccccaagagggcctgtacaacgagctccaaaaggataagatggcagaagcctatagcgagattggtatgaaaggggaacgcagaagaggcaaaggccacgacggactgtaccagggactcagcaccgccaccaaggacacctatgacgctcttcacatgcaggccctgccgcctcgg

SEQ ID NO: 181 - protein, 750 aa, Artificial Sequence
  source: /note="Description of Artificial Sequence: Synthetic polypeptide"
MALPVTALLLPLALLLHAARPRSSLALSLTADQMVSALLDAEPPILYSEYDPTRPFSEASMMGLLTNLADRELVHMINWAKRVPGFVDLTLHDQVHLLECAWMEILMIGLVWRSMEHPGKLLFAPNLLLDRNQGKCVEGGVEIFDMLLATSSRFRMMNLQGEEFVCLKSIILLNSGVYTFLSSTLKSLEEKDHIHRVLDKITDTLIHLMAKAGLTLQQQHQRLAQLLLILSHIRHMSNKRMEHLYSMKCKNVVPLSDLLLEMLDAHRLGTGAEDPRPSRKRRSLGDVGEVQLVESGGGLVQPGGSLRLSCAVSGFALSNHGMSWVRRAPGKGLEWVSGIVYSGSTYYAASVKGRFTISRDNSRNTLYLQMNSLRPEDTAIYYCSAHGGESDVWGQGTTVTVSSASGGGGSGGRASGGGGSDIQLTQSPSSLSASVGDRVTITCRASQSISSYLNWYQQKPGKAPKLLIYAASSLQSGVPSRFSGSGSGTDFTLTISSLQPEDFATYYCQQSYSTPYTFGQGTKVEIKTTTPAPRPPTPAPTIASQPLSLRPEACRPAAGGAVHTRGLDFACDIYIWAPLAGTCGVLLLSLVITLYCKRGRKKLLYIFKQPFMRPVQTTQEEDGCSCRFPEEEEGGCELRVKFSRSADAPAYQQGQNQLYNELNLGRREEYDVLDKRRGRDPEMGGKPRRKNPQEGLYNELQKDKMAEAYSEIGMKGERRRGKGHDGLYQGLSTATKDTYDALHMQALPPR

SEQ ID NO: 182 - DNA, 2250 bp, Artificial Sequence
  source: /note="Description of Artificial Sequence: Synthetic polynucleotide"
atggccctccctgtcaccgccctgctgcttccgctggctcttctgctccacgccgctcggccccggtcgtcgttggcactttccctgactgccgaccagatggtgtccgcccttctggacgccgagcctccaattctgtactcggagtacgatccgactcgcccgttctccgaagccagcatgatgggcctgttgactaacctggcggaccgcgagttggtgcacatgattaactgggctaagcgggtgccgggcttcgtggacctgaccctgcacgaccaagtgcacctcctggaatgcgcctggatggaaatcctcatgatcggcctcgtgtggagatccatggagcatcccggaaagctcctgtttgcacccaacctcctgcttgatcgcaaccagggaaaatgcgtggaagggggtgtcgagattttcgacatgctgctcgccacctcttcccggttccggatgatgaatctgcagggagaagagttcgtgtgtctgaagtcaatcatcctgctgaactccggggtctataccttcctgagctcgaccctcaagtcactggaggaaaaagaccacatccatcgcgtgctcgataagatcaccgacacccttatccatctcatggcgaaggctggactgaccctgcaacagcagcaccagaggctggcccagttgctgctgattctgagccacatccggcacatgtcgaacaagaggatggaacacctgtacagcatgaagtgcaagaacgtcgtgcctctgtccgatctgctcctggaaatgctggacgcgcacagactcggaaccggcgcggaagacccccggccctccaggaagcgaaggtccctcggagacgtgggtgaagtgcaattggtggaatcagggggaggacttgtgcagcctggaggatcgctgagactgtcatgtgccgtgtccggctttgccctgtccaaccacgggatgtcctgggtccgccgcgcgcctggaaagggcctcgaatgggtgtcgggtattgtgtacagcggtagcacctactatgccgcatccgtgaaggggagattcaccatcagccgggacaactccaggaacactctgtacctccaaatgaattcgctgaggccagaggacactgccatctactactgctccgcgcatggcggagagtccgacgtctggggacaggggaccaccgtgaccgtgtctagcgcgtccggcggaggcggcagcgggggtcgggcatcagggggcggcggatcggacatccagctcacccagtccccgagctcgctgtccgcctccgtgggagatcgggtcaccatcacgtgccgcgccagccagtcgatttcctcctacctgaactggtaccaacagaagcccggaaaagccccgaagcttctcatctacgccgcctcgagcctgcagtcaggagtgccctcacggttctccggctccggttccggtactgatttcaccctgaccatttcctccctgcaaccggaggacttcgctacttactactgccagcagtcgtactccaccccctacactttcggacaaggcaccaaggtcgaaatcaagaccactaccccagcaccgaggccacccaccccggctcctaccatcgcctcccagcctctgtccctgcgtccggaggcatgtagacccgcagctggtggggccgtgcatacccggggtcttgacttcgcctgcgatatctacatttgggcccctctggctggtacttgcggggtcctgctgctttcactcgtgatcactctttactgtaagcgcggtcggaagaagctgctgtacatctttaagcaacccttcatgaggcctgtgcagactactcaagaggaggacggctgttcatgccggttcccagaggaggaggaaggcggctgcgaactgcgcgtgaaattcagccgcagcgcagatgctccagcctaccagcaggggcagaaccagctctacaacgaactcaatcttggtcggagagaggagtacgacgtgctggacaagcggagaggacgggacccagaaatgggcgggaagccgcgcagaaagaatccccaagagggcctgtacaacgagctccaaaaggataagatggcagaagcctatagcgagattggtatgaaaggggaacgcagaagaggcaaaggccacgacggactgtaccagggactcagcaccgccaccaaggacacctatgacgctcttcacatgcaggccctgccgcctcgg

SEQ ID NO: 183 - protein, 744 aa, Artificial Sequence
  source: /note="Description of Artificial Sequence: Synthetic polypeptide"
MALPVTALLLPLALLLHAARPRSSLALSLTADQMVSALLDAEPPILYSEYDPTRPFSEASMMGLLTNLADRELVHMINWAKRVPGFVDLTLHDQVHLLECAWMEILMIGLVWRSMEHPGKLLFAPNLLLDRNQGKCVEGGVEIFDMLLATSSRFRMMNLQGEEFVCLKSIILLNSGVYTFLSSTLKSLEEKDHIHRVLDKITDTLIHLMAKAGLTLQQQHQRLAQLLLILSHIRHMSNKRMEHLYSMKCKNVVPLSDLLLEMLDAHRLGTGAEDPRPSRKRREVQLVESGGGLVQPGGSLRLSCAVSGFALSNHGMSWVRRAPGKGLEWVSGIVYSGSTYYAASVKGRFTISRDNSRNTLYLQMNSLRPEDTAIYYCSAHGGESDVWGQGTTVTVSSASGGGGSGGRASGGGGSDIQLTQSPSSLSASVGDRVTITCRASQSISSYLNWYQQKPGKAPKLLIYAASSLQSGVPSRFSGSGSGTDFTLTISSLQPEDFATYYCQQSYSTPYTFGQGTKVEIKTTTPAPRPPTPAPTIASQPLSLRPEACRPAAGGAVHTRGLDFACDIYIWAPLAGTCGVLLLSLVITLYCKRGRKKLLYIFKQPFMRPVQTTQEEDGCSCRFPEEEEGGCELRVKFSRSADAPAYQQGQNQLYNELNLGRREEYDVLDKRRGRDPEMGGKPRRKNPQEGLYNELQKDKMAEAYSEIGMKGERRRGKGHDGLYQGLSTATKDTYDALHMQALPPR

SEQ ID NO: 184 - DNA, 2232 bp, Artificial Sequence
  source: /note="Description of Artificial Sequence: Synthetic polynucleotide"
atggccctccctgtcaccgccctgctgcttccgctggctcttctgctccacgccgctcggccccggtcgtcgttggcactttccctgactgccgaccagatggtgtccgcccttctggacgccgagcctccaattctgtactcggagtacgatccgactcgcccgttctccgaagccagcatgatgggcctgttgactaacctggcggaccgcgagttggtgcacatgattaactgggctaagcgggtgccgggcttcgtggacctgaccctgcacgaccaagtgcacctcctggaatgcgcctggatggaaatcctcatgatcggcctcgtgtggagatccatggagcatcccggaaagctcctgtttgcacccaacctcctgcttgatcgcaaccagggaaaatgcgtggaagggggtgtcgagattttcgacatgctgctcgccacctcttcccggttccggatgatgaatctgcagggagaagagttcgtgtgtctgaagtcaatcatcctgctgaactccggggtctataccttcctgagctcgaccctcaagtcactggaggaaaaagaccacatccatcgcgtgctcgataagatcaccgacacccttatccatctcatggcgaaggctggactgaccctgcaacagcagcaccagaggctggcccagttgctgctgattctgagccacatccggcacatgtcgaacaagaggatggaacacctgtacagcatgaagtgcaagaacgtcgtgcctctgtccgatctgctcctggaaatgctggacgcgcacagactcgggacgggagctgaagatccacgacccagcagaaagcgacgggaagtgcaattggtggaatcagggggaggacttgtgcagcctggaggatcgctgagactgtcatgtgccgtgtccggctttgccctgtccaaccacgggatgtcctgggtccgccgcgcgcctggaaagggcctcgaatgggtgtcgggtattgtgtacagcggtagcacctactatgccgcatccgtgaaggggagattcaccatcagccgggacaactccaggaacactctgtacctccaaatgaattcgctgaggccagaggacactgccatctactactgctccgcgcatggcggagagtccgacgtctggggacaggggaccaccgtgaccgtgtctagcgcgtccggcggaggcggcagcgggggtcgggcatcagggggcggcggatcggacatccagctcacccagtccccgagctcgctgtccgcctccgtgggagatcgggtcaccatcacgtgccgcgccagccagtcgatttcctcctacctgaactggtaccaacagaagcccggaaaagccccgaagcttctcatctacgccgcctcgagcctgcagtcaggagtgccctcacggttctccggctccggttccggtactgatttcaccctgaccatttcctccctgcaaccggaggacttcgctacttactactgccagcagtcgtactccaccccctacactttcggacaaggcaccaaggtcgaaatcaagaccactaccccagcaccgaggccacccaccccggctcctaccatcgcctcccagcctctgtccctgcgtccggaggcatgtagacccgcagctggtggggccgtgcatacccggggtcttgacttcgcctgcgatatctacatttgggcccctctggctggtacttgcggggtcctgctgctttcactcgtgatcactctttactgtaagcgcggtcggaagaagctgctgtacatctttaagcaacccttcatgaggcctgtgcagactactcaagaggaggacggctgttcatgccggttcccagaggaggaggaaggcggctgcgaactgcgcgtgaaattcagccgcagcgcagatgctccagcctaccagcaggggcagaaccagctctacaacgaactcaatcttggtcggagagaggagtacgacgtgctggacaagcggagaggacgggacccagaaatgggcgggaagccgcgcagaaagaatccccaagagggcctgtacaacgagctccaaaaggataagatggcagaagcctatagcgagattggtatgaaaggggaacgcagaagaggcaaaggccacgacggactgtaccagggactcagcaccgccaccaaggacacctatgacgctcttcacatgcaggccctgccgcctcgg

SEQ ID NO: 185 - DNA, 521 bp, Unknown
  source: /note="Description of Unknown: Wildtype PGK promoter"
acccctctctccagccactaagccagttgctccctcggctgacggctgcacgcgaggcctccgaacgtcttacgccttgtggcgcgcccgtccttgtcccgggtgtgatggcggggtgtggggcggagggcgtggcggggaagggccggcgacgagagccgcgcgggacgactcgtcggcgataaccggtgtcgggtagcgccagccgcgcgacggtaacgagggaccgcgacaggcagacgctcccatgatcactctgcacgccgaaggcaaatagtgcaggccgtgcggcgcttggcgttccttggaagggctgaatccccgcctcgtccttcgcagcggccccccgggtgttcccatcgccgcttctaggcccactgcgacgcttgcctgcacttcttacacgctctgggtcccagccgcggcgacgcaaagggccttggtgcgggtctcgtcggcgcagggacgcgtttgggtcccgacggaaccttttccgcgttggggttggggcaccataagct

SEQ ID NO: 186 - DNA, 118 bp, Artificial Sequence
  source: /note="Description of Artificial Sequence: Synthetic polynucleotide"
acccctctctccagccactaagccagttgctccctcggctgacggctgcacgcgaggcctccgaacgtcttacgccttgtggcgcgcccgtccttgtcccgggtgtgatggcggggtg

SEQ ID NO: 187 - DNA, 221 bp, Artificial Sequence
  source: /note="Description of Artificial Sequence: Synthetic polynucleotide"
acccctctctccagccactaagccagttgctccctcggctgacggctgcacgcgaggcctccgaacgtcttacgccttgtggcgcgcccgtccttgtcccgggtgtgatggcggggtgtggggcggagggcgtggcggggaagggccggcgacgagagccgcgcgggacgactcgtcggcgataaccggtgtcgggtagcgccagccgcgcgacggtaacg

SEQ ID NO: 188 - DNA, 324 bp, Artificial Sequence
  source: /note="Description of Artificial Sequence: Synthetic polynucleotide"
acccctctctccagccactaagccagttgctccctcggctgacggctgcacgcgaggcctccgaacgtcttacgccttgtggcgcgcccgtccttgtcccgggtgtgatggcggggtgtggggcggagggcgtggcggggaagggccggcgacgagagccgcgcgggacgactcgtcggcgataaccggtgtcgggtagcgccagccgcgcgacggtaacgagggaccgcgacaggcagacgctcccatgatcactctgcacgccgaaggcaaatagtgcaggccgtgcggcgcttggcgttccttggaagggctgaatccccg

SEQ ID NO: 189 - DNA, 422 bp, Artificial Sequence
  source: /note="Description of Artificial Sequence: Synthetic polynucleotide"
acccctctctccagccactaagccagttgctccctcggctgacggctgcacgcgaggcctccgaacgtcttacgccttgtggcgcgcccgtccttgtcccgggtgtgatggcggggtgtggggcggagggcgtggcggggaagggccggcgacgagagccgcgcgggacgactcgtcggcgataaccggtgtcgggtagcgccagccgcgcgacggtaacgagggaccgcgacaggcagacgctcccatgatcactctgcacgccgaaggcaaatagtgcaggccgtgcggcgcttggcgttccttggaagggctgaatccccgcctcgtccttcgcagcggccccccgggtgttcccatcgccgcttctaggcccactgcgacgcttgcctgcacttcttacacgctctgggtcccagccg

SEQ ID NO: 190 - protein, 21 aa, Artificial Sequence
  source: /note="Description of Artificial Sequence: Synthetic peptide"
  VARIANT (1)..(3): /replace=" "
  misc_feature (1)..(21): /note="Variant residues given in the sequence have no preference with respect to those in the annotations for variant positions"
GSGEGRGSLLTCGDVEENPGP

SEQ ID NO: 191 - protein, 22 aa, Artificial Sequence
  source: /note="Description of Artificial Sequence: Synthetic peptide"
  VARIANT (1)..(3): /replace=" "
  misc_feature (1)..(22): /note="Variant residues given in the sequence have no preference with respect to those in the annotations for variant positions"
GSGATNFSLLKQAGDVEENPGP

SEQ ID NO: 192 - protein, 23 aa, Artificial Sequence
  source: /note="Description of Artificial Sequence: Synthetic peptide"
  VARIANT (1)..(3): /replace=" "
  misc_feature (1)..(23): /note="Variant residues given in the sequence have no preference with respect to those in the annotations for variant positions"
GSGQCTNYALLKLAGDVESNPGP

SEQ ID NO: 193 - protein, 25 aa, Artificial Sequence
  source: /note="Description of Artificial Sequence: Synthetic peptide"
  VARIANT (1)..(3): /replace=" "
  misc_feature (1)..(25): /note="Variant residues given in the sequence have no preference with respect to those in the annotations for variant positions"
GSGVKQTLNFDLLKLAGDVESNPGP

SEQ ID NO: 194-200 - skipped (7 entries)

SEQ ID NO: 201 - protein, 241 aa, Artificial Sequence
  source: /note="Description of Artificial Sequence: Synthetic polypeptide"
QVQLVQSGAEVEKPGASVKVSCKASGYTFTDYYMHWVRQAPGQGLEWMGWINPNSGGTNYAQKFQGRVTMTRDTSISTAYMELSRLRSDDTAVYYCASGWDFDYWGQGTLVTVSSGGGGSGGGGSGGGGSGGGGSDIVMTQSPSSLSASVGDRVTITCRASQSIRYYLSWYQQKPGKAPKLLIYTASILQNGVPSRFSGSGSGTDFTLTISSLQPEDFATYYCLQTYTTPDFGPGTKVEIK

SEQ ID NO: 202 - protein, 241 aa, Artificial Sequence
  source: /note="Description of Artificial Sequence: Synthetic polypeptide"
QVQLQQSGAEVKKPGASVKVSCKASGYTFTGYYMHWVRQAPGQGLEWMGWINPNSGGTNYAQNFQGRVTMTRDTSISTAYMELRRLRSDDTAVYYCASGWDFDYWGQGTLVTVSSGGGGSGGGGSGGGGSGGGGSDIRMTQSPSSLSASVGDRVTITCRASQSIRYYLSWYQQKPGKAPKLLIYTASILQNGVPSRFSGSGSGTDFTLTISSLQPEDFATYYCLQTYTTPDFGPGTKVEIK

SEQ ID NO: 203 - protein, 239 aa, Artificial Sequence
  source: /note="Description of Artificial Sequence: Synthetic polypeptide"
QVQLQQSGPELEKPGASVKISCKASGYSFTGYTMNWVKQSHGKSLEWIGLITPYNGASSYNQKFRGKATLTVDKSSSTAYMDLLSLTSEDSAVYFCARGGYDGRGFDYWGQGTTVTVSSGGGGSGGGGSGGGGSDIELTQSPAIMSASPGEKVTMTCSASSSVSYMHWYQQKSGTSPKRWIYDTSKLASGVPGRFSGSGSGNSYSLTISSVEAEDDATYYCQQWSGYPLTFGAGTKLEI

SEQ ID NO: 204 - protein, 244 aa, Artificial Sequence
  source: /note="Description of Artificial Sequence: Synthetic polypeptide"
QVQLQQSGAEVKKPGASVKVSCKASGYTFTGYYMHWVRQAPGQGLEWMGRINPNSGGTNYAQKFQGRVTMTRDTSISTAYMELSRLRSEDTAVYYCARGRYYGMDVWGQGTMVTVSSGGGGSGGGGSGGGGSGGGGSEIVLTQSPATLSLSPGERATISCRASQSVSSNFAWYQQRPGQAPRLLIYDASNRATGIPPRFSGSGSGTDFTLTISSLEPEDFAAYYCHQRSNWLYTFGQGTKVDIK

SEQ ID NO: 205 - protein, 253 aa, Artificial Sequence
  source: /note="Description of Artificial Sequence: Synthetic polypeptide"
QVQLVQSGAEVKKPGASVKVSCKASGYTFTGYYMHWVRQAPGQGLEWMGWINPNSGGTNYAQKFQGRVTMTRDTSISTAYMELSRLRSDDTAVYYCARDLRRTVVTPRAYYGMDVWGQGTTVTVSSGGGGSGGGGSGGGGSGGGGSDIQLTQSPSTLSASVGDRVTITCQASQDISNSLNWYQQKAGKAPKLLIYDASTLETGVPSRFSGSGSGTDFSFTISSLQPEDIATYYCQQHDNLPLTFGQGTKVEIK

SEQ ID NO: 206 - protein, 246 aa, Artificial Sequence
  source: /note="Description of Artificial Sequence: Synthetic polypeptide"
QVQLVQSGAEVKKPGAPVKVSCKASGYTFTGYYMHWVRQAPGQGLEWMGWINPNSGGTNYAQKFQGRVTMTRDTSISTAYMELSRLRSDDTAVYYCARGEWDGSYYYDYWGQGTLVTVSSGGGGSGGGGSGGGGSGGGGSDIVLTQTPSSLSASVGDRVTITCRASQSINTYLNWYQHKPGKAPKLLIYAASSLQSGVPSRFSGSGSGTDFTLTISSLQPEDFATYYCQQSFSPLTFGGGTKLEIK

SEQ ID NO: 207 - protein, 242 aa, Artificial Sequence
  source: /note="Description of Artificial Sequence: Synthetic polypeptide"
QVQLVESGGGLVQPGGSLRLSCAASGFTFSSYWMHWVRQVPGKGLVWVSRINTDGSTTTYADSVEGRFTISRDNAKNTLYLQMNSLRDDDTAVYYCVGGHWAVWGQGTTVTVSSGGGGSGGGGSGGGGSGGGGSDIQMTQSPSTLSASVGDRVTITCRASQSISDRLAWYQQKPGKAPKLLIYKASSLESGVPSRFSGSGSGTEFTLTISSLQPDDFAVYYCQQYGHLPMYTFGQGTKVEIK

SEQ ID NO: 208 - protein, 252 aa, Artificial Sequence
  source: /note="Description of Artificial Sequence: Synthetic polypeptide"
QVQLVQSGAEVKKPGASVKVSCKASGYTFTSYYMHWVRQAPGQGLEWMGIINPSGGSTSYAQKFQGRVTMTRDTSTSTVYMELSSLRSEDTAVYYCARYRLIAVAGDYYYYGMDVWGQGTMVTVSSGGGGSGGGGSGGGGSGGGGSDIQMTQSPSSVASVGDRVTITCRASQGVGRWLAWYQQKPGTAPKLLIYAASTLQSGVPSRFSGSGSGTDFTLTINNLQPEDFATYYCQQANSFPLTFGGGTRLEIK

SEQ ID NO: 209 - protein, 250 aa, Artificial Sequence
  source: /note="Description of Artificial Sequence: Synthetic polypeptide"
QVQLVQSGGGVVQPGRSLRLSCAASGFTFSSYAMHWVRQAPGKGLEWVAVISYDGSNKYYADSVKGRFTISRDNSKNTLYLQMNSLRAEDTAVYYCARWKVSSSSPAFDYWGQGTLVTVSSGGGGSGGGGSGGGGSGGGGSEIVLTQSPATLSLSPGERAILSCRASQSVYTKYLGWYQQKPGQAPRLLIYDASTRATGIPDRFSGSGSGTDFTLTINRLEPEDFAVYYCQHYGGSPLITFGQGTRLEIK

SEQ ID NO: 210 - protein, 246 aa, Artificial Sequence
  source: /note="Description of Artificial Sequence: Synthetic polypeptide"
QVQLQQSGAEVKKPGASVKVSCKTSGYPFTGYSLHWVRQAPGQGLEWMGWINPNSGGTNYAQKFQGRVTMTRDTSISTAYMELSRLRSDDTAVYYCARDHYGGNSLFYWGQGTLVTVSSGGGGSGGGGSGGGGSGGGGSDIQLTQSPSSISASVGDTVSITCRASQDSGTWLAWYQQKPGKAPNLLMYDASTLEDGVPSRFSGSASGTEFTLTVNRLQPEDSATYYCQQYNSYPLTFGGGTKVDIK

SEQ ID NO: 211 - protein, 248 aa, Artificial Sequence
  source: /note="Description of Artificial Sequence: Synthetic polypeptide"
QVQLVQSGAEVKKPGASVEVSCKASGYTFTSYYMHWVRQAPGQGLEWMGIINPSGGSTGYAQKFQGRVTMTRDTSTSTVHMELSSLRSEDTAVYYCARGGYSSSSDAFDIWGQGTMVTVSSGGGGSGGGGSGGGGSGGGGSDIQMTQSPPSLSASVGDRVTITCRASQDISSALAWYQQKPGTPPKLLIYDASSLESGVPSRFSGSGSGTDFTLTISSLQPEDFATYYCQQFSSYPLTFGGGTRLEIK

SEQ ID NO: 212 - protein, 255 aa, Artificial Sequence
  source: /note="Description of Artificial Sequence: Synthetic polypeptide"
QVQLVQSGAEVKKPGASVKVSCKASGYTFTSYGISWVRQAPGQGLEWMGWISAYNGNTNYAQKLQGRVTMTTDTSTSTAYMELRSLRSDDTAVYYCARVAGGIYYYYGMDVWGQGTTITVSSGGGGSGGGGSGGGGSGGGGSDIVMTQTPDSLAVSLGERATISCKSSHSVLYNRNNKNYLAWYQQKPGQPPKLLFYWASTRKSGVPDRFSGSGSGTDFTLTISSLQPEDFATYFCQQTQTFPLTFGQGTRLEIN

SEQ ID NO: 213 - protein, 246 aa, Artificial Sequence
  source: /note="Description of Artificial Sequence: Synthetic polypeptide"
QVQLVQSGAEVKKPGASVKVSCKASGYTFTGYYMHWVRQAPGQGLEWMGRINPNSGGTNYAQKFQGRVTMTTDTSTSTAYMELRSLRSDDTAVYYCARTTTSYAFDIWGQGTMVTVSSGGGGSGGGGSGGGGSGGGGSDIQLTQSPSTLSASVGDRVTITCRASQSISTWLAWYQQKPGKAPNLLIYKASTLESGVPSRFSGSGSGTEFTLTISSLQPDDFATYYCQQYNTYSPYTFGQGTKLEIK

SEQ ID NO: 214 - protein, 249 aa, Artificial Sequence
  source: /note="Description of Artificial Sequence: Synthetic polypeptide"
QVQLVQSGGGLVKPGGSLRLSCEASGFIFSDYYMGWIRQAPGKGLEWVSYIGRSGSSMYYADSVKGRFTFSRDNAKNSLYLQMNSLRAEDTAVYYCAASPVVAATEDFQHWGQGTLVTVSSGGGGSGGGGSGGGGSGGGGSDIVMTQTPATLSLSPGERATLSCRASQSVTSNYLAWYQQKPGQAPRLLLFGASTRATGIPDRFSGSGSGTDFTLTINRLEPEDFAMYYCQQYGSAPVTFGQGTKLEIK

SEQ ID NO: 215 - protein, 249 aa, Artificial Sequence
  source: /note="Description of Artificial Sequence: Synthetic polypeptide"
QVQLVQSGAEVRAPGASVKISCKASGFTFRGYYIHWVRQAPGQGLEWMGIINPSGGSRAYAQKFQGRVTMTRDTSTSTVYMELSSLRSDDTAMYYCARTASCGGDCYYLDYWGQGTLVTVSSGGGGSGGGGSGGGGSGGGGSDIQMTQSPPTLSASVGDRVTITCRASENVNIWLAWYQQKPGKAPKLLIYKSSSLASGVPSRFSGSGSGAEFTLTISSLQPDDFATYYCQQYQSYPLTFGGGTKVDIK

SEQ ID NO: 216 - protein, 244 aa, Artificial Sequence
  source: /note="Description of Artificial Sequence: Synthetic polypeptide"
QVQLVQSGGGLVQPGRSLRLSCAASGFTFDDYAMHWVRQAPGKGLEWVSGISWNSGSIGYADSVKGRFTISRDNAKNSLYLQMNSLRAEDTAVYYCAKDGSSSWSWGYFDYWGQGTLVTVSSGGGGSGGGGSGGGGSSSELTQDPAVSVALGQTVRTTCQGDALRSYYASWYQQKPGQAPMLVIYGKNNRPSGIPDRFSGSDSGDTASLTITGAQAEDEADYYCNSRDSSGYPVFGTGTKVTVL

SEQ ID NO: 217 - protein, 246 aa, Artificial Sequence
  source: /note="Description of Artificial Sequence: Synthetic polypeptide"
EVQLVESGGGLVQPGRSLRLSCAASGFTFDDYAMHWVRQAPGKGLEWVSGISWNSGSTGYADSVKGRFTISRDNAKNSLYLQMNSLRAEDTALYYCAKDSSSWYGGGSAFDIWGQGTMVTVSSGGGGSGGGGSGGGGSSSELTQEPAVSVALGQTVRITCQGDSLRSYYASWYQQKPGQAPVLVIFGRSRRPSGIPDRFSGSSSGNTASLIITGAQAEDEADYYCNSRDNTANHYVFGTGTKLTVL

SEQ ID NO: 218 - protein, 246 aa, Artificial Sequence
  source: /note="Description of Artificial Sequence: Synthetic polypeptide"
EVQLVESGGGLVQPGRSLRLSCAASGFTFDDYAMHWVRQAPGKGLEWVSGISWNSGSTGYADSVKGRFTISRDNAKNSLYLQMNSLRAEDTALYYCAKDSSSWYGGGSAFDIWGQGTMVTVSSGGGGSGGGGSGGGGSSSELTQDPAVSVALGQTVRITCQGDSLRSYYASWYQQKPGQAPVLVIYGKNNRPSGIPDRFSGSSSGNTASLTITGAQAEDEADYYCNSRGSSGNHYVFGTGTKVTVL

SEQ ID NO: 219 - protein, 251 aa, Artificial Sequence
  source: /note="Description of Artificial Sequence: Synthetic polypeptide"
QVQLVQSGGGLVQPGGSLRLSCAASGFTFSSYWMHWVRQAPGKGLVWVSRINSDGSSTSYADSVKGRFTISRDNAKNTLYLQMNSLRAEDTAVYYCVRTGWVGSYYYYMDVWGKGTTVTVSSGGGGSGGGGSGGGGSGGGGSEIVLTQSPGTLSLSPGERATLSCRASQSVSSNYLAWYQQKPGQPPRLLIYDVSTRATGIPARFSGGGSGTDFTLTISSLEPEDFAVYYCQQRSNWPPWTFGQGTKVEIK

SEQ ID NO: 220 - protein, 250 aa, Artificial Sequence
  source: /note="Description of Artificial Sequence: Synthetic polypeptide"
QVQLVQSGGGVVQPGRSLRLSCAASGFTFSSYGMHWVRQAPGKGLEWVAVISYDGSNKYYADSVKGRFTISRDNSKNTLYLQMNSLRAEDTAVYYCAKGYSRYYYYGMDVWGQGTTVTVSSGGGGSGGGGSGGGGSGGGGSEIVMTQSPATLSLSPGERAILSCRASQSVYTKYLGWYQQKPGQAPRLLIYDASTRATGIPDRFSGSGSGTDFTLTINRLEPEDFAVYYCQHYGGSPLITFGQGTKVDIK

SEQ ID NO: 221 - protein, 249 aa, Artificial Sequence
  source: /note="Description of Artificial Sequence: Synthetic polypeptide"
QVQLVQSGGGLVQPGGSLRLSCAASGFTFSSYAMSWVRQAPGKGLEWVSAISGSGGSTYYADSVKGRFTISRDNSKNTLYLQMNSLRAEDTAVYYCAKREAAAGHDWYFDLWGRGTLVTVSSGGGGSGGGGSGGGGSGGGGSDIRVTQSPSSLSASVGDRVTITCRASQSISSYLNWYQQKPGKAPKLLIYAASSLQSGVPSRFSGSGSGTDFTLTISSLQPEDFATYYCQQSYSIPLTFGQGTKVEIK

SEQ ID NO: 222 - protein, 247 aa, Artificial Sequence
  source: /note="Description of Artificial Sequence: Synthetic polypeptide"
QVQLVQSWAEVKKPGASVKVSCKASGYTFTSYYMHWVRQAPGQGLEWMGIINPSGGSTSYAQKFQGRVTMTRDTSTSTVYMELSNLRSEDTAVYYCARSPRVTTGYFDYWGQGTLVTVSSGGGGSGGGGSGGGGSGGGGSDIQLTQSPSTLSASVGDRVTITCRASQSISSWLAWYQQKPGKAPKLLIYKASSLESGVPSRFSGSGSGTEFTLTISSLQPDDFATYYCQQYSSYPLTFGGGTRLEIK

SEQ ID NO: 223 - protein, 253 aa, Artificial Sequence
  source: /note="Description of Artificial Sequence: Synthetic polypeptide"
QVQLVQSGAEVRRPGASVKISCRASGDTSTRHYIHWLRQAPGQGPEWMGVINPTTGPATGSPAYAQMLQGRVTMTRDTSTRTVYMELRSLRFEDTAVYYCARSVVGRSAPYYFDYWGQGTLVTVSSGGGGSGGGGSGGGGSGGGGSDIQMTQSPSSLSASVGDRVTITCRASQGISDYSAWYQQKPGKAPKLLIYAASTLQSGVPSRFSGSGSGTDFTLTISYLQSEDFATYYCQQYYSYPLTFGGGTKVDIK

SEQ ID NO: 224 - protein, 249 aa, Artificial Sequence
  source: /note="Description of Artificial Sequence: Synthetic polypeptide"
QVQLQQSGAEVKKPGASVKVSCKASGYTFTNYYMHWVRQAPGQGLEWMGIINPSGGYTTYAQKFQGRLTMTRDTSTSTVYMELSSLRSEDTAVYYCARIRSCGGDCYYFDNWGQGTLVTVSSGGGGSGGGGSGGGGSGGGGSDIQLTQSPSTLSASVGDRVTITCRASENVNIWLAWYQQKPGKAPKLLIYKSSSLASGVPSRFSGSGSGAEFTLTISSLQPDDFATYYCQQYQSYPLTFGGGTKVDIK

SEQ ID NO: 225 - protein, 246 aa, Artificial Sequence
  source: /note="Description of Artificial Sequence: Synthetic polypeptide"
QITLKESGPALVKPTQTLTLTCTFSGFSLSTAGVHVGWIRQPPGKALEWLALISWADDKRYRPSLRSRLDITRVTSKDQVVLSMTNMQPEDTATYYCALQGFDGYEANWGPGTLVTVSSGGGGSGGGGSGGGGSGGGGSDIVMTQSPSSLSASAGDRVTITCRASRGISSALAWYQQKPGKPPKLLIYDASSLESGVPSRFSGSGSGTDFTLTIDSLEPEDFATYYCQQSYSTPWTFGQGTKVDIK

SEQ ID NO: 226 - protein, 10 aa, Artificial Sequence
  source: /note="Description of Artificial Sequence: Synthetic peptide"
GYTFTDYYMH

SEQ ID NO: 227 - protein, 17 aa, Artificial Sequence
  source: /note="Description of Artificial Sequence: Synthetic peptide"
WINPNSGGTNYAQKFQG

SEQ ID NO: 228 - protein, 6 aa, Artificial Sequence
  source: /note="Description of Artificial Sequence: Synthetic peptide"
GWDFDY

SEQ ID NO: 229 - protein, 10 aa, Artificial Sequence
  source: /note="Description of Artificial Sequence: Synthetic peptide"
GYTFTGYYMH

SEQ ID NO: 230 - protein, 17 aa, Artificial Sequence
  source: /note="Description of Artificial Sequence: Synthetic peptide"
WINPNSGGTNYAQNFQG

SEQ ID NO: 231 - protein, 10 aa, Artificial Sequence
  source: /note="Description of Artificial Sequence: Synthetic peptide"
GYSFTGYTMN

SEQ ID NO: 232 - protein, 17 aa, Artificial Sequence
  source: /note="Description of Artificial Sequence: Synthetic peptide"
LITPYNGASSYNQKFRG

SEQ ID NO: 233 - protein, 10 aa, Artificial Sequence
  source: /note="Description of Artificial Sequence: Synthetic peptide"
GGYDGRGFDY

SEQ ID NO: 234 - protein, 17 aa, Artificial Sequence
  source: /note="Description of Artificial Sequence: Synthetic peptide"
RINPNSGGTNYAQKFQG

SEQ ID NO: 235 - protein, 8 aa, Artificial Sequence
  source: /note="Description of Artificial Sequence: Synthetic peptide"
GRYYGMDV

SEQ ID NO: 236 - protein, 17 aa, Artificial Sequence
  source: /note="Description of Artificial Sequence: Synthetic peptide"
DLRRTVVTPRAYYGMDV

SEQ ID NO: 237 - protein, 11 aa, Artificial Sequence
  source: /note="Description of Artificial Sequence: Synthetic peptide"
GEWDGSYYYDY

SEQ ID NO: 238 - protein, 10 aa, Artificial Sequence
  source: /note="Description of Artificial Sequence: Synthetic peptide"
GFTFSSYWMH

SEQ ID NO: 239 - protein, 17 aa, Artificial Sequence
  source: /note="Description of Artificial Sequence: Synthetic peptide"
RINTDGSTTTYADSVEG

SEQ ID NO: 240 - protein, 5 aa, Artificial Sequence
  source: /note="Description of Artificial Sequence: Synthetic peptide"
GHWAV

SEQ ID NO: 241 - protein, 10 aa, Artificial Sequence
  source: /note="Description of Artificial Sequence: Synthetic peptide"
GYTFTSYYMH

SEQ ID NO: 242 - protein, 16 aa, Artificial Sequence
  source: /note="Description of Artificial Sequence: Synthetic peptide"
IINPSGGSTSYAQKFQ

SEQ ID NO: 243 - protein, 17 aa, Artificial Sequence
  source: /note="Description of Artificial Sequence: Synthetic peptide"
YRLIAVAGDYYYYGMDV

SEQ ID NO: 244 - protein, 10 aa, Artificial Sequence
  source: /note="Description of Artificial Sequence: Synthetic peptide"
GFTFSSYAMH

SEQ ID NO: 245 - protein, 17 aa, Artificial Sequence
  source: /note="Description of Artificial Sequence: Synthetic peptide"
VISYDGSNKYYADSVKG

SEQ ID NO: 246 - protein, 12 aa, Artificial Sequence
  source: /note="Description of Artificial Sequence: Synthetic peptide"
WKVSSSSPAFDY

SEQ ID NO: 247 - protein, 10 aa, Artificial Sequence
  source: /note="Description of Artificial Sequence: Synthetic peptide"
GYPFTGYSLH

SEQ ID NO: 248 - protein, 10 aa, Artificial Sequence
  source: /note="Description of Artificial Sequence: Synthetic peptide"
DHYGGNSLFY

SEQ ID NO: 249 - protein, 17 aa, Artificial Sequence
  source: /note="Description of Artificial Sequence: Synthetic peptide"
IINPSGGSTGYAQKFQG

SEQ ID NO: 250 - protein, 12 aa, Artificial Sequence
  source: /note="Description of Artificial Sequence: Synthetic peptide"
GGYSSSSDAFDI

SEQ ID NO: 251 - protein, 10 aa, Artificial Sequence
  source: /note="Description of Artificial Sequence: Synthetic peptide"
GYTFTSYGIS

SEQ ID NO: 252 - protein, 16 aa, Artificial Sequence
  source: /note="Description of Artificial Sequence: Synthetic peptide"
WISAYNGNTNYAQKLQ

SEQ ID NO: 253 - protein, 13 aa, Artificial Sequence
  source: /note="Description of Artificial Sequence: Synthetic peptide"
VAGGIYYYYGMDV

SEQ ID NO: 254 - protein, 9 aa, Artificial Sequence
  source: /note="Description of Artificial Sequence: Synthetic peptide"
TTTSYAFDI

SEQ ID NO: 255 - protein, 10 aa, Artificial Sequence
  source: /note="Description of Artificial Sequence: Synthetic peptide"
GFIFSDYYMG

SEQ ID NO: 256 - protein, 17 aa, Artificial Sequence
  source: /note="Description of Artificial Sequence: Synthetic peptide"
YIGRSGSSMYYADSVKG

SEQ ID NO: 257 - protein, 12 aa, Artificial Sequence
  source: /note="Description of Artificial Sequence: Synthetic peptide"
SPVVAATEDFQH

SEQ ID NO: 258 - protein, 10 aa, Artificial Sequence
  source: /note="Description of Artificial Sequence: Synthetic peptide"
GFTFRGYYIH

SEQ ID NO: 259 - protein, 17 aa, Artificial Sequence
  source: /note="Description of Artificial Sequence: Synthetic peptide"
IINPSGGSRAYAQKFQG

SEQ ID NO: 260 - protein, 13 aa, Artificial Sequence
  source: /note="Description of Artificial Sequence: Synthetic peptide"
TASCGGDCYYLDY

SEQ ID NO: 261 - protein, 10 aa, Artificial Sequence
  source: /note="Description of Artificial Sequence: Synthetic peptide"
GFTFDDYAMH

SEQ ID NO: 262 - protein, 16 aa, Artificial Sequence
  source: /note="Description of Artificial Sequence: Synthetic peptide"
GISWNSGSIGYADSVK

SEQ ID NO: 263 - protein, 13 aa, Artificial Sequence
  source: /note="Description of Artificial Sequence: Synthetic peptide"
DGSSSWSWGYFDY

SEQ ID NO: 264 - protein, 17 aa, Artificial Sequence
  source: /note="Description of Artificial Sequence: Synthetic peptide"
GISWNSGSTGYADSVKG

SEQ ID NO: 265 - protein, 14 aa, Artificial Sequence
  source: /note="Description of Artificial Sequence: Synthetic peptide"
DSSSWYGGGSAFDI

SEQ ID NO: 266 - protein, 17 aa, Artificial Sequence
  source: /note="Description of Artificial Sequence: Synthetic peptide"
RINSDGSSTSYADSVKG

SEQ ID NO: 267 - protein, 13 aa, Artificial Sequence
  source: /note="Description of Artificial Sequence: Synthetic peptide"
TGWVGSYYYYMDV

SEQ ID NO: 268 - protein, 10 aa, Artificial Sequence
  source: /note="Description of Artificial Sequence: Synthetic peptide"
GFTFSSYGMH

SEQ ID NO: 269 - protein, 12 aa, Artificial Sequence
  source: /note="Description of Artificial Sequence: Synthetic peptide"
GYSRYYYYGMDV

SEQ ID NO: 270 - protein, 10 aa, Artificial Sequence
  source: /note="Description of Artificial Sequence: Synthetic peptide"
GFTFSSYAMS

SEQ ID NO: 271 - protein, 17 aa, Artificial Sequence
  source: /note="Description of Artificial Sequence: Synthetic peptide"
AISGSGGSTYYADSVKG

SEQ ID NO: 272 - protein, 13 aa, Artificial Sequence
  source: /note="Description of Artificial Sequence: Synthetic peptide"
REAAAGHDWYFDL

SEQ ID NO: 273 - protein, 17 aa, Artificial Sequence
  source: /note="Description of Artificial Sequence: Synthetic peptide"
IINPSGGSTSYAQKFQG

SEQ ID NO: 274 - protein, 11 aa, Artificial Sequence
  source: /note="Description of Artificial Sequence: Synthetic peptide"
SPRVTTGYFDY

SEQ ID NO: 275 - protein, 10 aa, Artificial Sequence
  source: /note="Description of Artificial Sequence: Synthetic peptide"
GDTSTRHYIH

SEQ ID NO: 276 - protein, 21 aa, Artificial Sequence
  source: /note="Description of Artificial Sequence: Synthetic peptide"
VINPTTGPATGSPAYAQMLQG

SEQ ID NO: 277 - protein, 13 aa, Artificial Sequence
  source: /note="Description of Artificial Sequence: Synthetic peptide"
SVVGRSAPYYFDY

SEQ ID NO: 278 - protein, 10 aa, Artificial Sequence
  source: /note="Description of Artificial Sequence: Synthetic peptide"
GYTFTNYYMH

SEQ ID NO: 279 - protein, 17 aa, Artificial Sequence
  source: /note="Description of Artificial Sequence: Synthetic peptide"
IINPSGGYTTYAQKFQG

SEQ ID NO: 280 - protein, 13 aa, Artificial Sequence
  source: /note="Description of Artificial Sequence: Synthetic peptide"
IRSCGGDCYYFDN

SEQ ID NO: 281 - protein, 12 aa, Artificial Sequence
  source: /note="Description of Artificial Sequence: Synthetic peptide"
GFSLSTAGVHVG

SEQ ID NO: 282 - protein, 16 aa, Artificial Sequence
  source: /note="Description of Artificial Sequence: Synthetic peptide"
LISWADDKRYRPSLRS

SEQ ID NO: 283 - protein, 9 aa, Artificial Sequence
  source: /note="Description of Artificial Sequence: Synthetic peptide"
QGFDGYEAN

SEQ ID NO: 284 - protein, 11 aa, Artificial Sequence
  source: /note="Description of Artificial Sequence: Synthetic peptide"
RASQSIRYYLS

SEQ ID NO: 285 - protein, 7 aa, Artificial Sequence
  source: /note="Description of Artificial Sequence: Synthetic peptide"
TASILQN

SEQ ID NO: 286 - protein, 8 aa, Artificial Sequence
  source: /note="Description of Artificial Sequence: Synthetic peptide"
LQTYTTPD

SEQ ID NO: 287 - protein, 10 aa, Artificial Sequence
  source: /note="Description of Artificial Sequence: Synthetic peptide"
SASSSVSYMH

SEQ ID NO: 288 - protein, 7 aa, Artificial Sequence
  source: /note="Description of Artificial Sequence: Synthetic peptide"
DTSKLAS

SEQ ID NO: 289 - protein, 9 aa, Artificial Sequence
  source: /note="Description of Artificial Sequence: Synthetic peptide"
QQWSGYPLT

SEQ ID NO: 290 - protein, 11 aa, Artificial Sequence
  source: /note="Description of Artificial Sequence: Synthetic peptide"
RASQSVSSNFA

SEQ ID NO: 291 - protein, 7 aa, Artificial Sequence
  source: /note="Description of Artificial Sequence: Synthetic peptide"
DASNRAT

SEQ ID NO: 292 - protein, 9 aa, Artificial Sequence
  source: /note="Description of Artificial Sequence: Synthetic peptide"
HQRSNWLYT

SEQ ID NO: 293 - protein, 11 aa, Artificial Sequence
  source: /note="Description of Artificial Sequence: Synthetic peptide"
QASQDISNSLN

SEQ ID NO: 294 - protein, 7 aa, Artificial Sequence
  source: /note="Description of Artificial Sequence: Synthetic peptide"
DASTLET

SEQ ID NO: 295 - protein, 9 aa, Artificial Sequence
  source: /note="Description of Artificial Sequence: Synthetic peptide"
QQHDNLPLT

SEQ ID NO: 296 - protein, 11 aa, Artificial Sequence
  source: /note="Description of Artificial Sequence: Synthetic peptide"
RASQSINTYLN

SEQ ID NO: 297 - protein, 7 aa, Artificial Sequence
  source: /note="Description of Artificial Sequence: Synthetic peptide"
AASSLQS

SEQ ID NO: 298 - protein, 8 aa, Artificial Sequence
  source: /note="Description of Artificial Sequence: Synthetic peptide"
QQSFSPLT

SEQ ID NO: 299 - protein, 11 aa, Artificial Sequence
  source: /note="Description of Artificial Sequence: Synthetic peptide"
RASQSISDRLA

SEQ ID NO: 300 - protein, 7 aa, Artificial Sequence
  source: /note="Description of Artificial Sequence: Synthetic peptide"
KASSLES

SEQ ID NO: 301 - protein, 10 aa, Artificial Sequence
  source: /note="Description of Artificial Sequence: Synthetic peptide"
QQYGHLPMYT

SEQ ID NO: 302 - protein, 11 aa, Artificial Sequence
  source: /note="Description of Artificial Sequence: Synthetic peptide"
RASQGVGRWLA

SEQ ID NO: 303 - protein, 7 aa, Artificial Sequence
  source: /note="Description of Artificial Sequence: Synthetic peptide"
AASTLQS

SEQ ID NO: 304 - protein, 9 aa, Artificial Sequence
  source: /note="Description of Artificial Sequence: Synthetic peptide"
QQANSFPLT

SEQ ID NO: 305 - protein, 12 aa, Artificial Sequence
  source: /note="Description of Artificial Sequence: Synthetic peptide"
RASQSVYTKYLG

SEQ ID NO: 306 - protein, 7 aa, Artificial Sequence
  source: /note="Description of Artificial Sequence: Synthetic peptide"
DASTRAT

SEQ ID NO: 307 - protein, 10 aa, Artificial Sequence
  source: /note="Description of Artificial Sequence: Synthetic peptide"
QHYGGSPLIT

SEQ ID NO: 308 - protein, 11 aa, Artificial Sequence
  source: /note="Description of Artificial Sequence: Synthetic peptide"
RASQDSGTWLA

SEQ ID NO: 309 - protein, 7 aa, Artificial Sequence
  source: /note="Description of Artificial Sequence: Synthetic peptide"
DASTLED

SEQ ID NO: 310 - protein, 9 aa, Artificial Sequence
  source: /note="Description of Artificial Sequence: Synthetic peptide"
QQYNSYPLT

SEQ ID NO: 311 - protein, 11 aa, Artificial Sequence
  source: /note="Description of Artificial Sequence: Synthetic peptide"
RASQDISSALA

SEQ ID NO: 312 - protein, 7 aa, Artificial Sequence
  source: /note="Description of Artificial Sequence: Synthetic peptide"
DASSLES

SEQ ID NO: 313 - protein, 9 aa, Artificial Sequence
  source: /note="Description of Artificial Sequence: Synthetic peptide"
QQFSSYPLT

SEQ ID NO: 314 - protein, 17 aa, Artificial Sequence
  source: /note="Description of Artificial Sequence: Synthetic peptide"
KSSHSVLYNRNNKNYLA

SEQ ID NO: 315 - protein, 7 aa, Artificial Sequence
  source: /note="Description of Artificial Sequence: Synthetic peptide"
WASTRKS

SEQ ID NO: 316 - protein, 9 aa, Artificial Sequence
  source: /note="Description of Artificial Sequence: Synthetic peptide"
QQTQTFPLT

SEQ ID NO: 317 - protein, 11 aa, Artificial Sequence
  source: /note="Description of Artificial Sequence: Synthetic peptide"
RASQSISTWLA

SEQ ID NO: 318 - protein, 7 aa, Artificial Sequence
  source: /note="Description of Artificial Sequence: Synthetic peptide"
KASTLES

SEQ ID NO: 319 - protein, 10 aa, Artificial Sequence
  source: /note="Description of Artificial Sequence: Synthetic peptide"
QQYNTYSPYT

SEQ ID NO: 320 - protein, 12 aa, Artificial Sequence
  source: /note="Description of Artificial Sequence: Synthetic peptide"
RASQSVTSNYLA

SEQ ID NO: 321 - protein, 7 aa, Artificial Sequence
  source: /note="Description of Artificial Sequence: Synthetic peptide"
GASTRAT

SEQ ID NO: 322 - protein, 9 aa, Artificial Sequence
  source: /note="Description of Artificial Sequence: Synthetic peptide"
QQYGSAPVT

SEQ ID NO: 323 - protein, 11 aa, Artificial Sequence
  source: /note="Description of Artificial Sequence: Synthetic peptide"
RASENVNIWLA

SEQ ID NO: 324 - protein, 7 aa, Artificial Sequence
  source: /note="Description of Artificial Sequence: Synthetic peptide"
KSSSLAS

SEQ ID NO: 325 - protein, 9 aa, Artificial Sequence
  source: /note="Description of Artificial Sequence: Synthetic peptide"
QQYQSYPLT

SEQ ID NO: 326 - protein, 11 aa, Artificial Sequence
  source: /note="Description of Artificial Sequence: Synthetic peptide"
QGDALRSYYAS

SEQ ID NO: 327 - protein, 7 aa, Artificial Sequence
  source: /note="Description of Artificial Sequence: Synthetic peptide"
GKNNRPS

SEQ ID NO: 328 - protein, 10 aa, Artificial Sequence
  source: /note="Description of Artificial Sequence: Synthetic peptide"
NSRDSSGYPV

SEQ ID NO: 329 - protein, 11 aa, Artificial Sequence
  source: /note="Description of Artificial Sequence: Synthetic peptide"
QGDSLRSYYAS

SEQ ID NO: 330 - protein, 7 aa, Artificial Sequence
  source: /note="Description of Artificial Sequence: Synthetic peptide"
GRSRRPS

SEQ ID NO: 331 - protein, 11 aa, Artificial Sequence
  source: /note="Description of Artificial Sequence: Synthetic peptide"
NSRDNTANHYV

SEQ ID NO: 332 - protein, 11 aa, Artificial Sequence
  source: /note="Description of Artificial Sequence: Synthetic peptide"
NSRGSSGNHYV

SEQ ID NO: 333 - protein, 12 aa, Artificial Sequence
  source: /note="Description of Artificial Sequence: Synthetic peptide"
RASQSVSSNYLA

SEQ ID NO: 334 - protein, 7 aa, Artificial Sequence
  source: /note="Description of Artificial Sequence: Synthetic peptide"
DVSTRAT

SEQ ID NO: 335 - protein, 10 aa, Artificial Sequence
  source: /note="Description of Artificial Sequence: Synthetic peptide"
QQRSNWPPWT

SEQ ID NO: 336 - protein, 11 aa, Artificial Sequence
  source: /note="Description of Artificial Sequence: Synthetic peptide"
RASQSISSYLN

SEQ ID NO: 337 - protein, 9 aa, Artificial Sequence
  source: /note="Description of Artificial Sequence: Synthetic peptide"
QQSYSIPLT

SEQ ID NO: 338 - protein, 11 aa, Artificial Sequence
  source: /note="Description of Artificial Sequence: Synthetic peptide"
RASQSISSWLA

SEQ ID NO: 339 - protein, 9 aa, Artificial Sequence
  source: /note="Description of Artificial Sequence: Synthetic peptide"
QQYSSYPLT

SEQ ID NO: 340 - protein, 10 aa, Artificial Sequence
  source: /note="Description of Artificial Sequence: Synthetic peptide"
RASQGISDYS

SEQ ID NO: 341 - protein, 9 aa, Artificial Sequence
  source: /note="Description of Artificial Sequence: Synthetic peptide"
QQYYSYPLT

SEQ ID NO: 342 - protein, 11 aa, Artificial Sequence
  source: /note="Description of Artificial Sequence: Synthetic peptide"
RASRGISSALA

SEQ ID NO: 343 - protein, 9 aa, Artificial Sequence
  source: /note="Description of Artificial Sequence: Synthetic peptide"
QQSYSTPWT

SEQ ID NO: 344 - protein, 246 aa, Artificial Sequence
  source: /note="Description of Artificial Sequence: Synthetic polypeptide"
EIQLVQSGAEVKKPGATVKISCKGSGFNIEDYYIHWVQQAPGKGLEWMGRIDPENDETKYGPIFQGRVTITADTSTNTVYMELSSLRSEDTAVYYCAFRGGVYWGQGTTVTVSSGGGGSGGGGSGGGGSGGGGSDVVMTQSPDSLAVSLGERATINCKSSQSLLDSDGKTYLNWLQQKPGQPPKRLISLVSKLDSGVPDRFSGSGSGTDFTLTISSLQAEDVAVYYCWQGTHFPGTFGGGTKVEIK

SEQ ID NO: 345 - protein, 246 aa, Artificial Sequence
  source: /note="Description of Artificial Sequence: Synthetic polypeptide"
DVVMTQSPDSLAVSLGERATINCKSSQSLLDSDGKTYLNWLQQKPGQPPKRLISLVSKLDSGVPDRFSGSGSGTDFTLTISSLQAEDVAVYYCWQGTHFPGTFGGGTKVEIKGGGGSGGGGSGGGGSGGGGSEIQLVQSGAEVKKPGATVKISCKGSGFNIEDYYIHWVQQAPGKGLEWMGRIDPENDETKYGPIFQGRVTITADTSTNTVYMELSSLRSEDTAVYYCAFRGGVYWGQGTTVTVSS

SEQ ID NO: 346 - protein, 246 aa, Artificial Sequence
  source: /note="Description of Artificial Sequence: Synthetic polypeptide"
EIQLVQSGAEVKKPGESLRISCKGSGFNIEDYYIHWVRQMPGKGLEWMGRIDPENDETKYGPIFQGHVTISADTSINTVYLQWSSLKASDTAMYYCAFRGGVYWGQGTTVTVSSGGGGSGGGGSGGGGSGGGGSDVVMTQSPLSLPVTLGQPASISCKSSQSLLDSDGKTYLNWLQQRPGQSPRRLISLVSKLDSGVPDRFSGSGSGTDFTLKISRVEAEDVGVYYCWQGTHFPGTFGGGTKVEIK

SEQ ID NO: 347 - protein, 246 aa, Artificial Sequence
  source: /note="Description of Artificial Sequence: Synthetic polypeptide"
DVVMTQSPLSLPVTLGQPASISCKSSQSLLDSDGKTYLNWLQQRPGQSPRRLISLVSKLDSGVPDRFSGSGSGTDFTLKISRVEAEDVGVYYCWQGTHFPGTFGGGTKVEIKGGGGSGGGGSGGGGSGGGGSEIQLVQSGAEVKKPGESLRISCKGSGFNIEDYYIHWVRQMPGKGLEWMGRIDPENDETKYGPIFQGHVTISADTSINTVYLQWSSLKASDTAMYYCAFRGGVYWGQGTTVTVSS

SEQ ID NO: 348 - protein, 246 aa, Artificial Sequence
  source: /note="Description of Artificial Sequence: Synthetic polypeptide"
EIQLVQSGAEVKKPGATVKISCKGSGFNIEDYYIHWVQQAPGKGLEWMGRIDPENDETKYGPIFQGRVTITADTSTNTVYMELSSLRSEDTAVYYCAFRGGVYWGQGTTVTVSSGGGGSGGGGSGGGGSGGGGSDVVMTQSPLSLPVTLGQPASISCKSSQSLLDSDGKTYLNWLQQRPGQSPRRLISLVSKLDSGVPDRFSGSGSGTDFTLKISRVEAEDVGVYYCWQGTHFPGTFGGGTKVEIK

SEQ ID NO: 349 - protein, 246 aa, Artificial Sequence
  source: /note="Description of Artificial Sequence: Synthetic polypeptide"
EIQLVQSGAEVKKPGESLRISCKGSGFNIEDYYIHWVRQMPGKGLEWMGRIDPENDETKYGPIFQGHVTISADTSINTVYLQWSSLKASDTAMYYCAFRGGVYWGQGTTVTVSSGGGGSGGGGSGGGGSGGGGSDVVMTQSPDSLAVSLGERATINCKSSQSLLDSDGKTYLNWLQQKPGQPPKRLISLVSKLDSGVPDRFSGSGSGTDFTLTISSLQAEDVAVYYCWQGTHFPGTFGGGTKVEIK

SEQ ID NO: 350 - protein, 246 aa, Artificial Sequence
  source: /note="Description of Artificial Sequence: Synthetic polypeptide"
DVVMTQSPDSLAVSLGERATINCKSSQSLLDSDGKTYLNWLQQKPGQPPKRLISLVSKLDSGVPDRFSGSGSGTDFTLTISSLQAEDVAVYYCWQGTHFPGTFGGGTKVEIKGGGGSGGGGSGGGGSGGGGSEIQLVQSGAEVKKPGESLRISCKGSGFNIEDYYIHWVRQMPGKGLEWMGRIDPENDETKYGPIFQGHVTISADTSINTVYLQWSSLKASDTAMYYCAFRGGVYWGQGTTVTVSS

SEQ ID NO: 351 - protein, 246 aa, Artificial Sequence
  source: /note="Description of Artificial Sequence: Synthetic polypeptide"
DVVMTQSPLSLPVTLGQPASISCKSSQSLLDSDGKTYLNWLQQRPGQSPRRLISLVSKLDSGVPDRFSGSGSGTDFTLKISRVEAEDVGVYYCWQGTHFPGTFGGGTKVEIKGGGGSGGGGSGGGGSGGGGSEIQLVQSGAEVKKPGATVKISCKGSGFNIEDYYIHWVQQAPGKGLEWMGRIDPENDETKYGPIFQGRVTITADTSTNTVYMELSSLRSEDTAVYYCAFRGGVYWGQGTTVTVSS

SEQ ID NO: 352 - protein, 243 aa, Artificial Sequence
  source: /note="Description of Artificial Sequence: Synthetic polypeptide"
EIQLQQSGAELVKPGASVKLSCTGSGFNIEDYYIHWVKQRTEQGLEWIGRIDPENDETKYGPIFQGRATITADTSSNTVYLQLSSLTSEDTAVYYCAFRGGVYWGPGTTLTVSSGGGGSGGGGSGGGGSHMDVVMTQSPLTLSVAIGQSASISCKSSQSLLDSDGKTYLNWLLQRPGQSPKRLISLVSKLDSGVPDRFTGSGSGTDFTLRISRVEAEDLGIYYCWQGTHFPGTFGGGTKLEIK

SEQ ID NO: 353 - protein, 244 aa, Artificial Sequence
  source: /note="Description of Artificial Sequence: Synthetic polypeptide"
EVQLQQSGPELVKPGASMKISCKASGYSFTGYTMNWVKQSHGKNLEWIGLINPYNGGTIYNQKFKGKATLTVDKSSSTAYMELLSLTSEDSAVYYCARDYGFVLDYWGQGTTLTVSSGGGGSGGGGSGGGGSGGGGSQIVLTQSPSIMSVSPGEKVTITCSASSSVSYMHWFQQKPGTSPKLCIYSTSNLASGVPARFSGRGSGTSYSLTISRVAAEDAATYYCQQRSNYPPWTFGGGTKLEIK

SEQ ID NO: 354 - protein, 244 aa, Artificial Sequence
  source: /note="Description of Artificial Sequence: Synthetic polypeptide"
EVQLQQSGPELVKPGASMKISCKASGYSFTGYTMNWVKQSHGKNLEWIGLINPYNGGTIYNQKFKGKATLTVDKSSSTAYMELLSLTSEDSAVYYCARDYGFVLDYWGQGTTLTVSSGGGGSGGGGSGGGGSGGGGSQIVLTQSPAIMSASPGEKVTITCSASSSVSYLHWFQQKPGTSPKLWVYSTSNLPSGVPARFGGSGSGTSYSLTISRMEAEDAATYYCQQRSIYPPWTFGGGTKLEIK

SEQ ID NO: 355 - protein, 244 aa, Artificial Sequence
  source: /note="Description of Artificial Sequence: Synthetic polypeptide"
EVQLQQSGPELVKPGASMKISCKASGYSFTGYTMNWVKQSHGKNLEWIGLINPYNGGTIYNQKFKGKATLTVDKSSSTAYMELLSLTSEDSAVYYCARDYGFVLDYWGQGTTLTVSSGGGGSGGGGSGGGGSGGGGSQIVLTQSPSIMSVSPGEKVTITCSASSSVSYMHWFQQKPGTSPKLGIYSTSNLASGVPARFSGRGSGTSYSLTISRVAAEDAATYYCQQRSNYPPWTFGGGTKLEIK

SEQ ID NO: 356 - protein, 242 aa, Artificial Sequence
  source: /note="Description of Artificial Sequence: Synthetic polypeptide"
DIQMTQTTSSLSASLGDRVTISCRASQDISKYLNWYQQKPDGTVKLLIYHTSRLHSGVPSRFSGSGSGTDYSLTISNLEQEDIATYFCQQGNTLPYTFGGGTKLEITGGGGSGGGGSGGGGSEVKLQESGPGLVAPSQSLSVTCTVSGVSLPDYGVSWIRQPPRKGLEWLGVIWGSETTYYNSALKSRLTIIKDNSKSQVFLKMNSLQTDDTAIYYCAKHYYYGGSYAMDYWGQGTSVTVSS

SEQ ID NO: 357 - protein, 242 aa, Artificial Sequence
  source: /note="Description of Artificial Sequence: Synthetic polypeptide"
EIVMTQSPATLSLSPGERATLSCRASQDISKYLNWYQQKPGQAPRLLIYHTSRLHSGIPARFSGSGSGTDYTLTISSLQPEDFAVYFCQQGNTLPYTFGQGTKLEIKGGGGSGGGGSGGGGSQVQLQESGPGLVKPSETLSLTCTVSGVSLPDYGVSWIRQPPGKGLEWIGVIWGSETTYYSSSLKSRVTISKDNSKNQVSLKLSSVTAADTAVYYCAKHYYYGGSYAMDYWGQGTLVTVSS

SEQ ID NO: 358 - protein, 242 aa, Artificial Sequence
  source: /note="Description of Artificial Sequence: Synthetic polypeptide"
EIVMTQSPATLSLSPGERATLSCRASQDISKYLNWYQQKPGQAPRLLIYHTSRLHSGIPARFSGSGSGTDYTLTISSLQPEDFAVYFCQQGNTLPYTFGQGTKLEIKGGGGSGGGGSGGGGSQVQLQESGPGLVKPSETLSLTCTVSGVSLPDYGVSWIRQPPGKGLEWIGVIWGSETTYYQSSLKSRVTISKDNSKNQVSLKLSSVTAADTAVYYCAKHYYYGGSYAMDYWGQGTLVTVSS

SEQ ID NO: 359 - protein, 242 aa, Artificial Sequence
  source: /note="Description of Artificial Sequence: Synthetic polypeptide"
QVQLQESGPGLVKPSETLSLTCTVSGVSLPDYGVSWIRQPPGKGLEWIGVIWGSETTYYSSSLKSRVTISKDNSKNQVSLKLSSVTAADTAVYYCAKHYYYGGSYAMDYWGQGTLVTVSSGGGGSGGGGSGGGGSEIVMTQSPATLSLSPGERATLSCRASQDISKYLNWYQQKPGQAPRLLIYHTSRLHSGIPARFSGSGSGTDYTLTISSLQPEDFAVYFCQQGNTLPYTFGQGTKLEIK

SEQ ID NO: 360 - protein, 242 aa, Artificial Sequence
  source: /note="Description of Artificial Sequence: Synthetic polypeptide"
QVQLQESGPGLVKPSETLSLTCTVSGVSLPDYGVSWIRQPPGKGLEWIGVIWGSETTYYQSSLKSRVTISKDNSKNQVSLKLSSVTAADTAVYYCAKHYYYGGSYAMDYWGQGTLVTVSSGGGGSGGGGSGGGGSEIVMTQSPATLSLSPGERATLSCRASQDISKYLNWYQQKPGQAPRLLIYHTSRLHSGIPARFSGSGSGTDYTLTISSLQPEDFAVYFCQQGNTLPYTFGQGTKLEIK

SEQ ID NO: 361 - protein, 247 aa, Artificial Sequence
  source: /note="Description of Artificial Sequence: Synthetic polypeptide"
EIVMTQSPATLSLSPGERATLSCRASQDISKYLNWYQQKPGQAPRLLIYHTSRLHSGIPARFSGSGSGTDYTLTISSLQPEDFAVYFCQQGNTLPYTFGQGTKLEIKGGGGSGGGGSGGGGSGGGGSQVQLQESGPGLVKPSETLSLTCTVSGVSLPDYGVSWIRQPPGKGLEWIGVIWGSETTYYSSSLKSRVTISKDNSKNQVSLKLSSVTAADTAVYYCAKHYYYGGSYAMDYWGQGTLVTVSS

SEQ ID NO: 362 - protein, 247 aa, Artificial Sequence
  source: /note="Description of Artificial Sequence: Synthetic polypeptide"
EIVMTQSPATLSLSPGERATLSCRASQDISKYLNWYQQKPGQAPRLLIYHTSRLHSGIPARFSGSGSGTDYTLTISSLQPEDFAVYFCQQGNTLPYTFGQGTKLEIKGGGGSGGGGSGGGGSGGGGSQVQLQESGPGLVKPSETLSLTCTVSGVSLPDYGVSWIRQPPGKGLEWIGVIWGSETTYYQSSLKSRVTISKDNSKNQVSLKLSSVTAADTAVYYCAKHYYYGGSYAMDYWGQGTLVTVSS

SEQ ID NO: 363 - protein, 247 aa, Artificial Sequence
  source: /note="Description of Artificial Sequence: Synthetic polypeptide"
QVQLQESGPGLVKPSETLSLTCTVSGVSLPDYGVSWIRQPPGKGLEWIGVIWGSETTYYSSSLKSRVTISKDNSKNQVSLKLSSVTAADTAVYYCAKHYYYGGSYAMDYWGQGTLVTVSSGGGGSGGGGSGGGGSGGGGSEIVMTQSPATLSLSPGERATLSCRASQDISKYLNWYQQKPGQAPRLLIYHTSRLHSGIPARFSGSGSGTDYTLTISSLQPEDFAVYFCQQGNTLPYTFGQGTKLEIK

SEQ ID NO: 364 - protein, 247 aa, Artificial Sequence
  source: /note="Description of Artificial Sequence: Synthetic polypeptide"
QVQLQESGPGLVKPSETLSLTCTVSGVSLPDYGVSWIRQPPGKGLEWIGVIWGSETTYYQSSLKSRVTISKDNSKNQVSLKLSSVTAADTAVYYCAKHYYYGGSYAMDYWGQGTLVTVSSGGGGSGGGGSGGGGSGGGGSEIVMTQSPATLSLSPGERATLSCRASQDISKYLNWYQQKPGQAPRLLIYHTSRLHSGIPARFSGSGSGTDYTLTISSLQPEDFAVYFCQQGNTLPYTFGQGTKLEIK

SEQ ID NO: 365 - protein, 247 aa, Artificial Sequence
  source: /note="Description of Artificial Sequence: Synthetic polypeptide"
EIVMTQSPATLSLSPGERATLSCRASQDISKYLNWYQQKPGQAPRLLIYHTSRLHSGIPARFSGSGSGTDYTLTISSLQPEDFAVYFCQQGNTLPYTFGQGTKLEIKGGGGSGGGGSGGGGSGGGGSQVQLQESGPGLVKPSETLSLTCTVSGVSLPDYGVSWIRQPPGKGLEWIGVIWGSETTYYNSSLKSRVTISKDNSKNQVSLKLSSVTAADTAVYYCAKHYYYGGSYAMDYWGQGTLVTVSS

SEQ ID NO: 366 - protein, 247 aa, Artificial Sequence
  source: /note="Description of Artificial Sequence: Synthetic polypeptide"
QVQLQESGPGLVKPSETLSLTCTVSGVSLPDYGVSWIRQPPGKGLEWIGVIWGSETTYYNSSLKSRVTISKDNSKNQVSLKLSSVTAADTAVYYCAKHYYYGGSYAMDYWGQGTLVTVSSGGGGSGGGGSGGGGSGGGGSEIVMTQSPATLSLSPGERATLSCRASQDISKYLNWYQQKPGQAPRLLIYHTSRLHSGIPARFSGSGSGTDYTLTISSLQPEDFAVYFCQQGNTLPYTFGQGTKLEIK

SEQ ID NO: 367 - protein, 242 aa, Artificial Sequence
  source: /note="Description of Artificial Sequence: Synthetic polypeptide"
EIVMTQSPATLSLSPGERATLSCRASQDISKYLNWYQQKPGQAPRLLIYHTSRLHSGIPARFSGSGSGTDYTLTISSLQPEDFAVYFCQQGNTLPYTFGQGTKLEIKGGGGSGGGGSGGGGSQVQLQESGPGLVKPSETLSLTCTVSGVSLPDYGVSWIRQPPGKGLEWIGVIWGSETTYYNSSLKSRVTISKDNSKNQVSLKLSSVTAADTAVYYCAKHYYYGGSYAMDYWGQGTLVTVSS

SEQ ID NO: 368 - protein, 242 aa, Artificial Sequence
  source: /note="Description of Artificial Sequence: Synthetic polypeptide"
QVQLQESGPGLVKPSETLSLTCTVSGVSLPDYGVSWIRQPPGKGLEWIGVIWGSETTYYNSSLKSRVTISKDNSKNQVSLKLSSVTAADTAVYYCAKHYYYGGSYAMDYWGQGTLVTVSSGGGGSGGGGSGGGGSEIVMTQSPATLSLSPGERATLSCRASQDISKYLNWYQQKPGQAPRLLIYHTSRLHSGIPARFSGSGSGTDYTLTISSLQPEDFAVYFCQQGNTLPYTFGQGTKLEIK

SEQ ID NO: 369 - protein, 10 aa, Artificial Sequence
  source: /note="Description of Artificial Sequence: Synthetic peptide"
GVSLPDYGVS

SEQ ID NO: 370 - protein, 16 aa, Artificial Sequence
  source: /note="Description of Artificial Sequence: Synthetic peptide"
VIWGSETTYYNSALKS

SEQ ID NO: 371 - protein, 12 aa, Artificial Sequence
  source: /note="Description of Artificial Sequence: Synthetic peptide"
HYYYGGSYAMDY

SEQ ID NO: 372 - protein, 16 aa, Artificial Sequence
  source: /note="Description of Artificial Sequence: Synthetic peptide"
VIWGSETTYYSSSLKS

SEQ ID NO: 373 - protein, 16 aa, Artificial Sequence
  source: /note="Description of Artificial Sequence: Synthetic peptide"
VIWGSETTYYQSSLKS

SEQ ID NO: 374 - protein, 16 aa, Artificial Sequence
  source: /note="Description of Artificial Sequence: Synthetic peptide"
VIWGSETTYYNSSLKS

SEQ ID NO: 375 - protein, 11 aa, Artificial Sequence
  source: /note="Description of Artificial Sequence: Synthetic peptide"
RASQDISKYLN

SEQ ID NO: 376 - protein, 7 aa, Artificial Sequence
  source: /note="Description of Artificial Sequence: Synthetic peptide"
HTSRLHS

SEQ ID NO: 377 - protein, 9 aa, Artificial Sequence
  source: /note="Description of Artificial Sequence: Synthetic peptide"
QQGNTLPYT

SEQ ID NO: 378 - protein, 18 aa, Artificial Sequence
  source: /note="Description of Artificial Sequence: Synthetic peptide"
GSTSGSGKPGSGEGSTKG

SEQ ID NO: 379 - protein, 119 aa, Artificial Sequence
  source: /note="Description of Artificial Sequence: Synthetic polypeptide"
QVQLLESGAELVRPGSSVKISCKASGYAFSSYWMNWVKQRPGQGLEWIGQIYPGDGDTNYNGKFKGQATLTADKSSSTAYMQLSGLTSEDSAVYSCARKTISSVVDFYFDYWGQGTTVT

SEQ ID NO: 380 - protein, 111 aa, Artificial Sequence
  source: /note="Description of Artificial Sequence: Synthetic polypeptide"
ELVLTQSPKFMSTSVGDRVSVTCKASQNVGTNVAWYQQKPGQSPKPLIYSATYRNSGVPDRFTGSGSGTDFTLTITNVQSKDLADYFYFCQYNRYPYTSGGGTKLEIKRRS

SEQ ID NO: 381 - protein, 248 aa, Artificial Sequence
  source: /note="Description of Artificial Sequence: Synthetic polypeptide"
QVQLLESGAELVRPGSSVKISCKASGYAFSSYWMNWVKQRPGQGLEWIGQIYPGDGDTNYNGKFKGQATLTADKSSSTAYMQLSGLTSEDSAVYSCARKTISSVVDFYFDYWGQGTTVTGSTSGSGKPGSGEGSTKGELVLTQSPKFMSTSVGDRVSVTCKASQNVGTNVAWYQQKPGQSPKPLIYSATYRNSGVPDRFTGSGSGTDFTLTITNVQSKDLADYFYFCQYNRYPYTSGGGTKLEIKRRS

SEQ ID NO: 382 - protein, 239 aa, Artificial Sequence
  source: /note="Description of Artificial Sequence: Synthetic polypeptide"
EVQLVESGGGLVQPGGSLRLSCAVSGFALSNHGMSWVRRAPGKGLEWVSGIVYSGSTYYAASVKGRFTISRDNSRNTLYLQMNSLRPEDTAIYYCSAHGGESDVWGQGTTVTVSSASGGGGSGGRASGGGGSDIQLTQSPSSLSASVGDRVTITCRASQSISSYLNWYQQKPGKAPKLLIYAASSLQSGVPSRFSGSGSGTDFTLTISSLQPEDFATYYCQQSYSTPYTFGQGTKVEIK

SEQ ID NO: 383 - DNA, 717 bp, Artificial Sequence
  source: /note="Description of Artificial Sequence: Synthetic polynucleotide"
gaagtgcaattggtggaatcagggggaggacttgtgcagcctggaggatcgctgagactgtcatgtgccgtgtccggctttgccctgtccaaccacgggatgtcctgggtccgccgcgcgcctggaaagggcctcgaatgggtgtcgggtattgtgtacagcggtagcacctactatgccgcatccgtgaaggggagattcaccatcagccgggacaactccaggaacactctgtacctccaaatgaattcgctgaggccagaggacactgccatctactactgctccgcgcatggcggagagtccgacgtctggggacaggggaccaccgtgaccgtgtctagcgcgtccggcggaggcggcagcgggggtcgggcatcagggggcggcggatcggacatccagctcacccagtccccgagctcgctgtccgcctccgtgggagatcgggtcaccatcacgtgccgcgccagccagtcgatttcctcctacctgaactggtaccaacagaagcccggaaaagccccgaagcttctcatctacgccgcctcgagcctgcagtcaggagtgccctcacggttctccggctccggttccggtactgatttcaccctgaccatttcctccctgcaaccggaggacttcgctacttactactgccagcagtcgtactccaccccctacactttcggacaaggcaccaaggtcgaaatcaag

SEQ ID NO: 384 - protein, 115 aa, Artificial Sequence
  source: /note="Description of Artificial Sequence: Synthetic polypeptide"
EVQLVESGGGLVQPGGSLRLSCAVSGFALSNHGMSWVRRAPGKGLEWVSGIVYSGSTYYAASVKGRFTISRDNSRNTLYLQMNSLRPEDTAIYYCSAHGGESDVWGQGTTVTVSS

SEQ ID NO: 385 - protein, 107 aa, Artificial Sequence
  source: /note="Description of Artificial Sequence: Synthetic polypeptide"
DIQLTQSPSSLSASVGDRVTITCRASQSISSYLNWYQQKPGKAPKLLIYAASSLQSGVPSRFSGSGSGTDFTLTISSLQPEDFATYYCQQSYSTPYTFGQGTKVEIK

SEQ ID NO: 386 - protein, 246 aa, Artificial Sequence
  source: /note="Description of Artificial Sequence: Synthetic polypeptide"
QVQLVESGGGLVQPGRSLRLSCAASGFTFSNYAMSWVRQAPGKGLGWVSGISRSGENTYYADSVKGRFTISRDNSKNTLYLQMNSLRDEDTAVYYCARSPAHYYGGMDVWGQGTTVTVSSASGGGGSGGRASGGGGSDIVLTQSPGTLSLSPGERATLSCRASQSISSSFLAWYQQKPGQAPRLLIYGASRRATGIPDRFSGSGSGTDFTLTISRLEPEDSAVYYCQQYHSSPSWTFGQGTKLEIK

SEQ ID NO: 387 - DNA, 738 bp, Artificial Sequence
  source: /note="Description of Artificial Sequence: Synthetic polynucleotide"
caagtgcaactcgtggaatctggtggaggactcgtgcaacccggaagatcgcttagactgtcgtgtgccgccagcgggttcactttctcgaactacgcgatgtcctgggtccgccaggcacccggaaagggactcggttgggtgtccggcatttcccggtccggcgaaaatacctactacgccgactccgtgaagggccgcttcaccatctcaagggacaacagcaaaaacaccctgtacttgcaaatgaactccctgcgggatgaagatacagccgtgtactattgcgcccggtcgcctgcccattactacggcggaatggacgtctggggacagggaaccactgtgactgtcagcagcgcgtcgggtggcggcggctcagggggtcgggcctccggggggggagggtccgacatcgtgctgacccagtccccgggaaccctgagcctgagcccgggagagcgcgcgaccctgtcatgccgggcatcccagagcattagctcctcctttctcgcctggtatcagcagaagcccggacaggccccgaggctgctgatctacggcgctagcagaagggctaccggaatcccagaccggttctccggctccggttccgggaccgatttcacccttactatctcgcgcctggaacctgaggactccgccgtctactactgccagcagtaccactcatccccgtcgtggacgttcggacagggcaccaagctggagattaag

SEQ ID NO: 388 - protein, 120 aa, Artificial Sequence
  source: /note="Description of Artificial Sequence: Synthetic polypeptide"
QVQLVESGGGLVQPGRSLRLSCAASGFTFSNYAMSWVRQAPGKGLGWVSGISRSGENTYYADSVKGRFTISRDNSKNTLYLQMNSLRDEDTAVYYCARSPAHYYGGMDVWGQGTTVTVSS

SEQ ID NO: 389 - protein, 109 aa, Artificial Sequence
  source: /note="Description of Artificial Sequence: Synthetic polypeptide"
DIVLTQSPGTLSLSPGERATLSCRASQSISSSFLAWYQQKPGQAPRLLIYGASRRATGIPDRFSGSGSGTDFTLTISRLEPEDSAVYYCQQYHSSPSWTFGQGTKLEIK

SEQ ID NO: 390 - protein, 244 aa, Artificial Sequence
  source: /note="Description of Artificial Sequence: Synthetic polypeptide"
QVQLVESGGGLVQPGRSLRLSCAASGFTFDDYAMHWVRQAPGKGLEWVSGISWNSGSIGYADSVKGRFTISRDNAKNSLYLQMNSLRAEDTALYYCSVHSFLAYWGQGTLVTVSSASGGGGSGGRASGGGGSDIVMTQTPLSLPVTPGEPASISCRSSQSLLHSNGYNYLDWYLQKPGQSPQLLIYLGSNRASGVPDRFSGSGSGTDFTLKISRVEAEDVGVYYCMQALQTPYTFGQGTKVEIK

SEQ ID NO: 391 - DNA, 732 bp, Artificial Sequence
  source: /note="Description of Artificial Sequence: Synthetic polynucleotide"
caagtgcaactcgtcgaatccggtggaggtctggtccaacctggtagaagcctgagactgtcgtgtgcggccagcggattcacctttgatgactatgctatgcactgggtgcggcaggccccaggaaagggcctggaatgggtgtcgggaattagctggaactccgggtccattggctacgccgactccgtgaagggccgcttcaccatctcccgcgacaacgcaaagaactccctgtacttgcaaatgaactcgctcagggctgaggataccgcgctgtactactgctccgtgcattccttcctggcctactggggacagggaactctggtcaccgtgtcgagcgcctccggcggcgggggctcgggtggacgggcctcgggcggaggggggtccgacatcgtgatgacccagaccccgctgagcttgcccgtgactcccggagagcctgcatccatctcctgccggtcatcccagtcccttctccactccaacggatacaactacctcgactggtacctccagaagccgggacagagccctcagcttctgatctacctggggtcaaatagagcctcaggagtgccggatcggttcagcggatctggttcgggaactgatttcactctgaagatttcccgcgtggaagccgaggacgtgggcgtctactactgtatgcaggcgctgcagaccccctataccttcggccaagggacgaaagtggagatcaag

SEQ ID NO: 392 - protein, 115 aa, Artificial Sequence
  source: /note="Description of Artificial Sequence: Synthetic polypeptide"
QVQLVESGGGLVQPGRSLRLSCAASGFTFDDYAMHWVRQAPGKGLEWVSGISWNSGSIGYADSVKGRFTISRDNAKNSLYLQMNSLRAEDTALYYCSVHSFLAYWGQGTLVTVSS

SEQ ID NO: 393 - protein, 112 aa, Artificial Sequence
  source: /note="Description of Artificial Sequence: Synthetic polypeptide"
DIVMTQTPLSLPVTPGEPASISCRSSQSLLHSNGYNYLDWYLQKPGQSPQLLIYLGSNRASGVPDRFSGSGSGTDFTLKISRVEAEDVGVYYCMQALQTPYTFGQGTKVEIK

SEQ ID NO: 394 - protein, 243 aa, Artificial Sequence
  source: /note="Description of Artificial Sequence: Synthetic polypeptide"
EVQLLESGGGLVQPGGSLRLSCAVSGFALSNHGMSWVRRAPGKGLEWVSGIVYSGSTYYAASVKGRFTISRDNSRNTLYLQMNSLRPEDTAIYYCSAHGGESDVWGQGTTVTVSSASGGGGSGGRASGGGGSDIVMTQTPLSLSVTPGQPASISCKSSQSLLRNDGKTPLYWYLQKAGQPPQLLIYEVSNRFSGVPDRFSGSGSGTDFTLKISRVEAEDVGAYYCMQNIQFPSFGGGTKLEIK

SEQ ID NO: 395 - DNA, 729 bp, Artificial Sequence
  source: /note="Description of Artificial Sequence: Synthetic polynucleotide"
gaagtgcaattgttggaatctggaggaggacttgtgcagcctggaggatcactgagactttcgtgtgcggtgtcaggcttcgccctgagcaaccacggcatgagctgggtgcggagagccccggggaagggtctggaatgggtgtccgggatcgtctactccggttcaacttactacgccgcaagcgtgaagggtcgcttcaccatttcccgcgataactcccggaacaccctgtacctccaaatgaactccctgcggcccgaggacaccgccatctactactgttccgcgcatggaggagagtccgatgtctggggacagggcactaccgtgaccgtgtcgagcgcctcggggggaggaggctccggcggtcgcgcctccggggggggtggcagcgacattgtgatgacgcagactccactctcgctgtccgtgaccccgggacagcccgcgtccatctcgtgcaagagctcccagagcctgctgaggaacgacggaaagactcctctgtattggtacctccagaaggctggacagcccccgcaactgctcatctacgaagtgtcaaatcgcttctccggggtgccggatcggttttccggctcgggatcgggcaccgacttcaccctgaaaatctccagggtcgaggccgaggacgtgggagcctactactgcatgcaaaacatccagttcccttccttcggcggcggcacaaagctggagattaag

SEQ ID NO: 396 - protein, 115 aa, Artificial Sequence
  source: /note="Description of Artificial Sequence: Synthetic polypeptide"
EVQLLESGGGLVQPGGSLRLSCAVSGFALSNHGMSWVRRAPGKGLEWVSGIVYSGSTYYAASVKGRFTISRDNSRNTLYLQMNSLRPEDTAIYYCSAHGGESDVWGQGTTVTVSS

SEQ ID NO: 397 - protein, 111 aa, Artificial Sequence
  source: /note="Description of Artificial Sequence: Synthetic polypeptide"
DIVMTQTPLSLSVTPGQPASISCKSSQSLLRNDGKTPLYWYLQKAGQPPQLLIYEVSNRFSGVPDRFSGSGSGTDFTLKISRVEAEDVGAYYCMQNIQFPSFGGGTKLEIK

SEQ ID NO: 398 - protein, 249 aa, Artificial Sequence
  source: /note="Description of Artificial Sequence: Synthetic polypeptide"
QVQLVQSGAEVRKTGASVKVSCKASGYIFDNFGINWVRQAPGQGLEWMGWINPKNNNTNYAQKFQGRVTITADESTNTAYMEVSSLRSEDTAVYYCARGPYYYQSYMDVWGQGTMVTVSSASGGGGSGGRASGGGGSDIVMTQTPLSLPVTPGEPASISCRSSQSLLHSNGYNYLNWYLQKPGQSPQLLIYLGSKRASGVPDRFSGSGSGTDFTLHITRVGAEDVGVYYCMQALQTPYTFGQGTKLEIK

SEQ ID NO: 399 - DNA, 747 bp, Artificial Sequence
  source: /note="Description of Artificial Sequence: Synthetic polynucleotide"
caagtccaactcgtccagtccggcgcagaagtcagaaaaaccggtgctagcgtgaaagtgtcctgcaaggcctccggctacattttcgataacttcggaatcaactgggtcagacaggccccgggccaggggctggaatggatgggatggatcaaccccaagaacaacaacaccaactacgcacagaagttccagggccgcgtgactatcaccgccgatgaatcgaccaataccgcctacatggaggtgtcctccctgcggtcggaggacactgccgtgtattactgcgcgaggggcccatactactaccaaagctacatggacgtctggggacagggaaccatggtgaccgtgtcatccgcctccggtggtggaggctccggggggcgggcttcaggaggcggaggaagcgatattgtgatgacccagactccgcttagcctgcccgtgactcctggagaaccggcctccatttcctgccggtcctcgcaatcactcctgcattccaacggttacaactacctgaattggtacctccagaagcctggccagtcgccccagttgctgatctatctgggctcgaagcgcgcctccggggtgcctgaccggtttagcggatctgggagcggcacggacttcactctccacatcacccgcgtgggagcggaggacgtgggagtgtactactgtatgcaggcgctgcagactccgtacacattcggacagggcaccaagctggagatcaag

SEQ ID NO: 400 - protein, 120 aa, Artificial Sequence
  source: /note="Description of Artificial Sequence: Synthetic polypeptide"
QVQLVQSGAEVRKTGASVKVSCKASGYIFDNFGINWVRQAPGQGLEWMGWINPKNNNTNYAQKFQGRVTITADESTNTAYMEVSSLRSEDTAVYYCARGPYYYQSYMDVWGQGTMVTVSS

SEQ ID NO: 401 - protein, 112 aa, Artificial Sequence
  source: /note="Description of Artificial Sequence: Synthetic polypeptide"
DIVMTQTPLSLPVTPGEPASISCRSSQSLLHSNGYNYLNWYLQKPGQSPQLLIYLGSKRASGVPDRFSGSGSGTDFTLHITRVGAEDVGVYYCMQALQTPYTFGQGTKLEIK

SEQ ID NO: 402 - protein, 246 aa, Artificial Sequence
  source: /note="Description of Artificial Sequence: Synthetic polypeptide"
QVQLQESGGGLVQPGGSLRLSCAASGFTFSSDAMTWVRQAPGKGLEWVSVISGSGGTTYYADSVKGRFTISRDNSKNTLYLQMNSLRAEDTAVYYCAKLDSSGYYYARGPRYWGQGTLVTVSSASGGGGSGGRASGGGGSDIQLTQSPSSLSASVGDRVTITCRASQSISSYLNWYQQKPGKAPKLLIYGASTLASGVPARFSGSGSGTHFTLTINSLQSEDSATYYCQQSYKRASFGQGTKVEIK

SEQ ID NO: 403 - DNA, 738 bp, Artificial Sequence
  source: /note="Description of Artificial Sequence: Synthetic polynucleotide"
caagtgcaacttcaagaatcaggcggaggactcgtgcagcccggaggatcattgcggctctcgtgcgccgcctcgggcttcaccttctcgagcgacgccatgacctgggtccgccaggccccggggaaggggctggaatgggtgtctgtgatttccggctccgggggaactacgtactacgccgattccgtgaaaggtcgcttcactatctcccgggacaacagcaagaacaccctttatctgcaaatgaattccctccgcgccgaggacaccgccgtgtactactgcgccaagctggactcctcgggctactactatgcccggggtccgagatactggggacagggaaccctcgtgaccgtgtcctccgcgtccggcggaggagggtcgggagggcgggcctccggcggcggcggttcggacatccagctgacccagtccccatcctcactgagcgcaagcgtgggcgacagagtcaccattacatgcagggcgtcccagagcatcagctcctacctgaactggtaccaacagaagcctggaaaggctcctaagctgttgatctacggggcttcgaccctggcatccggggtgcccgcgaggtttagcggaagcggtagcggcactcacttcactctgaccattaacagcctccagtccgaggattcagccacttactactgtcagcagtcctacaagcgggccagcttcggacagggcactaaggtcgagatcaag

SEQ ID NO: 404 - protein, 123 aa, Artificial Sequence
  source: /note="Description of Artificial Sequence: Synthetic polypeptide"
QVQLQESGGGLVQPGGSLRLSCAASGFTFSSDAMTWVRQAPGKGLEWVSVISGSGGTTYYADSVKGRFTISRDNSKNTLYLQMNSLRAEDTAVYYCAKLDSSGYYYARGPRYWGQGTLVTVSS

SEQ ID NO: 405 - protein, 106 aa, Artificial Sequence
  source: /note="Description of Artificial Sequence: Synthetic polypeptide"
DIQLTQSPSSLSASVGDRVTITCRASQSISSYLNWYQQKPGKAPKLLIYGASTLASGVPARFSGSGSGTHFTLTINSLQSEDSATYYCQQSYKRASFGQGTKVEIK

SEQ ID NO: 406 - protein, 247 aa, Artificial Sequence
  source: /note="Description of Artificial Sequence: Synthetic polypeptide"
QVQLVQSGAEVKKPGASVKVSCKASGYTFSNYGITWVRQAPGQGLEWMGWISAYNGNTNYAQKFQGRVTMTRNTSISTAYMELSSLRSEDTAVYYCARGPYYYYMDVWGKGTMVTVSSASGGGGSGGRASGGGGSEIVMTQSPLSLPVTPGEPASISCRSSQSLLYSNGYNYVDWYLQKPGQSPQLLIYLGSNRASGVPDRFSGSGSGTDFKLQISRVEAEDVGIYYCMQGRQFPYSFGQGTKVEIK

SEQ ID NO: 407 - DNA, 741 bp, Artificial Sequence
  source: /note="Description of Artificial Sequence: Synthetic polynucleotide"
caagtccaactggtccagagcggtgcagaagtgaagaagcccggagcgagcgtgaaagtgtcctgcaaggcttccgggtacaccttctccaactacggcatcacttgggtgcgccaggccccgggacagggcctggaatggatggggtggatttccgcgtacaacggcaatacgaactacgctcagaagttccagggtagagtgaccatgactaggaacacctccatttccaccgcctacatggaactgtcctccctgcggagcgaggacaccgccgtgtactattgcgcccggggaccatactactactacatggatgtctgggggaaggggactatggtcaccgtgtcatccgcctcgggaggcggcggatcaggaggacgcgcctctggtggtggaggatcggagatcgtgatgacccagagccctctctccttgcccgtgactcctggggagcccgcatccatttcatgccggagctcccagtcacttctctactccaacggctataactacgtggattggtacctccaaaagccgggccagagcccgcagctgctgatctacctgggctcgaacagggccagcggagtgcctgaccggttctccgggtcgggaagcgggaccgacttcaagctgcaaatctcgagagtggaggccgaggacgtgggaatctactactgtatgcagggccgccagtttccgtactcgttcggacagggcaccaaagtggaaatcaag

SEQ ID NO: 408 - protein, 118 aa, Artificial Sequence
  source: /note="Description of Artificial Sequence: Synthetic polypeptide"
QVQLVQSGAEVKKPGASVKVSCKASGYTFSNYGITWVRQAPGQGLEWMGWISAYNGNTNYAQKFQGRVTMTRNTSISTAYMELSSLRSEDTAVYYCARGPYYYYMDVWGKGTMVTVSS

SEQ ID NO: 409 - protein, 112 aa, Artificial Sequence
  source: /note="Description of Artificial Sequence: Synthetic polypeptide"
EIVMTQSPLSLPVTPGEPASISCRSSQSLLYSNGYNYVDWYLQKPGQSPQLLIYLGSNRASGVPDRFSGSGSGTDFKLQISRVEAEDVGIYYCMQGRQFPYSFGQGTKVEIK

SEQ ID NO: 410 - protein, 238 aa, Artificial Sequence
  source: /note="Description of Artificial Sequence: Synthetic polypeptide"
EVQLLETGGGLVQPGGSLRLSCAVSGFALSNHGMSWVRRAPGKGLEWVSGIVYSGSTYYAASVKGRFTISRDNSRNTLYLQMNSLRPEDTAIYYCSAHGGESDVWGQGTTVTVSSASGGGGSGGRASGGGGSEIVLTQSPATLSVSPGESATLSCRASQSVSSNLAWYQQKPGQAPRLLIYGASTRASGIPDRFSGSGSGTDFTLTISSLQAEDVAVYYCQQYGSSLTFGGGTKVEIK

SEQ ID NO: 411 - DNA, 714 bp, Artificial Sequence
  source: /note="Description of Artificial Sequence: Synthetic polynucleotide"
gaagtgcaattgctcgaaactggaggaggtctggtgcaacctggaggatcacttcgcctgtcctgcgccgtgtcgggctttgccctgtccaaccatggaatgagctgggtccgccgcgcgccggggaagggcctcgaatgggtgtccggcatcgtctactccggctccacctactacgccgcgtccgtgaagggccggttcacgatttcacgggacaactcgcggaacaccctgtacctccaaatgaattcccttcggccggaggatactgccatctactactgctccgcccacggtggcgaatccgacgtctggggccagggaaccaccgtgaccgtgtccagcgcgtccgggggaggaggaagcgggggtagagcatcgggtggaggcggatcagagatcgtgctgacccagtcccccgccaccttgagcgtgtcaccaggagagtccgccaccctgtcatgccgcgccagccagtccgtgtcctccaacctggcttggtaccagcagaagccggggcaggcccctagactcctgatctatggggcgtcgacccgggcatctggaattcccgataggttcagcggatcgggctcgggcactgacttcactctgaccatctcctcgctgcaagccgaggacgtggctgtgtactactgtcagcagtacggaagctccctgactttcggtggcgggaccaaagtcgagattaag

SEQ ID NO: 412 - protein, 115 aa, Artificial Sequence
  source: /note="Description of Artificial Sequence: Synthetic polypeptide"
EVQLLETGGGLVQPGGSLRLSCAVSGFALSNHGMSWVRRAPGKGLEWVSGIVYSGSTYYAASVKGRFTISRDNSRNTLYLQMNSLRPEDTAIYYCSAHGGESDVWGQGTTVTVSS

SEQ ID NO: 413 - protein, 106 aa, Artificial Sequence
  source: /note="Description of Artificial Sequence: Synthetic polypeptide"
EIVLTQSPATLSVSPGESATLSCRASQSVSSNLAWYQQKPGQAPRLLIYGASTRASGIPDRFSGSGSGTDFTLTISSLQAEDVAVYYCQQYGSSLTFGGGTKVEIK

SEQ ID NO: 414 - protein, 239 aa, Artificial Sequence
  source: /note="Description of Artificial Sequence: Synthetic polypeptide"
EVQLVETGGGLVQPGGSLRLSCAVSGFALSNHGMSWVRRAPGKGLEWVSGIVYSGSTYYAASVKGRFTISRDNSRNTLYLQMNSLRPEDTAIYYCSAHGGESDVWGQGTTVTVSSASGGGGSGGRASGGGGSEIVMTQSPATLSVSPGERATLSCRASQSVSSKLAWYQQKPGQAPRLLMYGASIRATGIPDRFSGSGSGTEFTLTISSLEPEDFAVYYCQQYGSSSWTFGQGTKVEIK

SEQ ID NO: 415 - DNA, 717 bp, Artificial Sequence
  source: /note="Description of Artificial Sequence: Synthetic polynucleotide"
gaagtgcaattggtggaaactggaggaggacttgtgcaacctggaggatcattgagactgagctgcgcagtgtcgggattcgccctgagcaaccatggaatgtcctgggtcagaagggcccctggaaaaggcctcgaatgggtgtcagggatcgtgtactccggttccacttactacgccgcctccgtgaaggggcgcttcactatctcacgggataactcccgcaataccctgtacctccaaatgaacagcctgcggccggaggataccgccatctactactgttccgcccacggtggagagtctgacgtctggggccagggaactaccgtgaccgtgtcctccgcgtccggcggtggagggagcggcggccgcgccagcggcggcggaggctccgagatcgtgatgacccagagccccgctactctgtcggtgtcgcccggagaaagggcgaccctgtcctgccgggcgtcgcagtccgtgagcagcaagctggcttggtaccagcagaagccgggccaggcaccacgcctgcttatgtacggtgcctccattcgggccaccggaatcccggaccggttctcggggtcggggtccggtaccgagttcacactgaccatttcctcgctcgagcccgaggactttgccgtctattactgccagcagtacggctcctcctcatggacgttcggccaggggaccaaggtcgaaatcaag

SEQ ID NO: 416 - protein, 115 aa, Artificial Sequence
  source: /note="Description of Artificial Sequence: Synthetic polypeptide"
EVQLVETGGGLVQPGGSLRLSCAVSGFALSNHGMSWVRRAPGKGLEWVSGIVYSGSTYYAASVKGRFTISRDNSRNTLYLQMNSLRPEDTAIYYCSAHGGESDVWGQGTTVTVSS

SEQ ID NO: 417 - protein, 107 aa, Artificial Sequence
  source: /note="Description of Artificial Sequence: Synthetic polypeptide"
EIVMTQSPATLSVSPGERATLSCRASQSVSSKLAWYQQKPGQAPRLLMYGASIRATGIPDRFSGSGSGTEFTLTISSLEPEDFAVYYCQQYGSSSWTFGQGTKVEIK

SEQ ID NO: 418 - protein, 241 aa, Artificial Sequence
  source: /note="Description of Artificial Sequence: Synthetic polypeptide"
EVQLVETGGGVVQPGGSLRLSCAVSGFALSNHGMSWVRRAPGKGLEWVSGIVYSGSTYYAASVKGRFTISRDNSRNTLYLQMNSLRPEDTAIYYCSAHGGESDVWGQGTTVTVSSASGGGGSGGRASGGGGSEIVLTQSPGTLSLSPGERATLSCRASQSVGSTNLAWYQQKPGQAPRLLIYDASNRATGIPDRFSGGGSGTDFTLTISRLEPEDFAVYYCQQYGSSPPWTFGQGTKVEIK

SEQ ID NO: 419 - DNA, 723 bp, Artificial Sequence
  source: /note="Description of Artificial Sequence: Synthetic polynucleotide"
gaagtgcaattggtggagactggaggaggagtggtgcaacctggaggaagcctgagactgtcatgcgcggtgtcgggcttcgccctctccaaccacggaatgtcctgggtccgccgggcccctgggaaaggacttgaatgggtgtccggcatcgtgtactcgggttccacctactacgcggcctcagtgaagggccggtttactattagccgcgacaactccagaaacacactgtacctccaaatgaactcgctgcggccggaagataccgctatctactactgctccgcccatgggggagagtcggacgtctggggacagggcaccactgtcactgtgtccagcgcttccggcggtggtggaagcgggggacgggcctcaggaggcggtggcagcgagattgtgctgacccagtcccccgggaccctgagcctgtccccgggagaaagggccaccctctcctgtcgggcatcccagtccgtggggtctactaaccttgcatggtaccagcagaagcccggccaggcccctcgcctgctgatctacgacgcgtccaatagagccaccggcatcccggatcgcttcagcggaggcggatcgggcaccgacttcaccctcaccatttcaaggctggaaccggaggacttcgccgtgtactactgccagcagtatggttcgtccccaccctggacgttcggccaggggactaaggtcgagatcaag

SEQ ID NO: 420 - protein, 115 aa, Artificial Sequence
  source: /note="Description of Artificial Sequence: Synthetic polypeptide"
EVQLVETGGGVVQPGGSLRLSCAVSGFALSNHGMSWVRRAPGKGLEWVSGIVYSGSTYYAASVKGRFTISRDNSRNTLYLQMNSLRPEDTAIYYCSAHGGESDVWGQGTTVTVSS

SEQ ID NO: 421 - protein, 109 aa, Artificial Sequence
  source: /note="Description of Artificial Sequence: Synthetic polypeptide"
EIVLTQSPGTLSLSPGERATLSCRASQSVGSTNLAWYQQKPGQAPRLLIYDASNRATGIPDRFSGGGSGTDFTLTISRLEPEDFAVYYCQQYGSSPPWTFGQGTKVEIK

SEQ ID NO: 422 - protein, 239 aa, Artificial Sequence
  source: /note="Description of Artificial Sequence: Synthetic polypeptide"
QVQLVESGGGLVKPGGSLRLSCAASGFTFSDYYMSWIRQAPGKGLEWVSYISSSGSTIYYADSVKGRFTISRDNAKNSLYLQMNSLRAEDTAVYYCARESGDGMDVWGQGTTVTVSSASGGGGSGGRASGGGGSDIQMTQSPSSLSASVGDRVTITCRASQSISSYLNWYQQKPGKAPKLLIYAASSLQSGVPSRFSGSGSGTDFTLTISSLQPEDFATYYCQQSYTLAFGQGTKVDIK

SEQ ID NO: 423 - DNA, 717 bp, Artificial Sequence
  source: /note="Description of Artificial Sequence: Synthetic polynucleotide"
caagtgcaactcgtggaatctggtggaggactcgtgaaacctggaggatcattgagactgtcatgcgcggcctcgggattcacgttctccgattactacatgagctggattcgccaggctccggggaagggactggaatgggtgtcctacatttcctcatccggctccaccatctactacgcggactccgtgaaggggagattcaccattagccgcgataacgccaagaacagcctgtaccttcagatgaactccctgcgggctgaagatactgccgtctactactgcgcaagggagagcggagatgggatggacgtctggggacagggtaccactgtgaccgtgtcgtcggcctccggcggagggggttcgggtggaagggccagcggcggcggaggcagcgacatccagatgacccagtccccctcatcgctgtccgcctccgtgggcgaccgcgtcaccatcacatgccgggcctcacagtcgatctcctcctacctcaattggtatcagcagaagcccggaaaggcccctaagcttctgatctacgcagcgtcctccctgcaatccggggtcccatctcggttctccggctcgggcagcggtaccgacttcactctgaccatctcgagcctgcagccggaggacttcgccacttactactgtcagcaaagctacaccctcgcgtttggccagggcaccaaagtggacatcaag

SEQ ID NO: 424 - protein, 117 aa, Artificial Sequence
  source: /note="Description of Artificial Sequence: Synthetic polypeptide"
QVQLVESGGGLVKPGGSLRLSCAASGFTFSDYYMSWIRQAPGKGLEWVSYISSSGSTIYYADSVKGRFTISRDNAKNSLYLQMNSLRAEDTAVYYCARESGDGMDVWGQGTTVTVSS

SEQ ID NO: 425 - protein, 105 aa, Artificial Sequence
  source: /note="Description of Artificial Sequence: Synthetic polypeptide"
DIQMTQSPSSLSASVGDRVTITCRASQSISSYLNWYQQKPGKAPKLLIYAASSLQSGVPSRFSGSGSGTDFTLTISSLQPEDFATYYCQQSYTLAFGQGTKVDIK

SEQ ID NO: 426 - protein, 246 aa, Artificial Sequence
  source: /note="Description of Artificial Sequence: Synthetic polypeptide"
QVQLVQSGGGLVKPGGSLRLSCAASGFTFSDYYMSWIRQAPGKGLEWVSYISSSGNTIYYADSVKGRFTISRDNAKNSLYLQMNSLRAEDTAVYYCARSTMVREDYWGQGTLVTVSSASGGGGSGGRASGGGGSDIVLTQSPLSLPVTLGQPASISCKSSESLVHNSGKTYLNWFHQRPGQSPRRLIYEVSNRDSGVPDRFTGSGSGTDFTLKISRVEAEDVGVYYCMQGTHWPGTFGQGTKLEIK

SEQ ID NO: 427 - DNA, 738 bp, Artificial Sequence
  source: /note="Description of Artificial Sequence: Synthetic polynucleotide"
caagtgcaactggtgcaaagcggaggaggattggtcaaacccggaggaagcctgagactgtcatgcgcggcctctggattcaccttctccgattactacatgtcatggatcagacaggccccggggaagggcctcgaatgggtgtcctacatctcgtcctccgggaacaccatctactacgccgacagcgtgaagggccgctttaccatttcccgcgacaacgcaaagaactcgctgtaccttcagatgaattccctgcgggctgaagataccgcggtgtactattgcgcccggtccactatggtccgggaggactactggggacagggcacactcgtgaccgtgtccagcgcgagcgggggtggaggcagcggtggacgcgcctccggcggcggcggttcagacatcgtgctgactcagtcgcccctgtcgctgccggtcaccctgggccaaccggcctcaattagctgcaagtcctcggagagcctggtgcacaactcaggaaagacttacctgaactggttccatcagcggcctggacagtccccacggaggctcatctatgaagtgtccaacagggattcgggggtgcccgaccgcttcactggctccgggtccggcaccgacttcaccttgaaaatctccagagtggaagccgaggacgtgggcgtgtactactgtatgcagggtacccactggcctggaacctttggacaaggaactaagctcgagattaag

SEQ ID NO: 428 - protein, 117 aa, Artificial Sequence
  source: /note="Description of Artificial Sequence: Synthetic polypeptide"
QVQLVQSGGGLVKPGGSLRLSCAASGFTFSDYYMSWIRQAPGKGLEWVSYISSSGNTIYYADSVKGRFTISRDNAKNSLYLQMNSLRAEDTAVYYCARSTMVREDYWGQGTLVTVSS

SEQ ID NO: 429 - protein, 112 aa, Artificial Sequence
  source: /note="Description of Artificial Sequence: Synthetic polypeptide"
DIVLTQSPLSLPVTLGQPASISCKSSESLVHNSGKTYLNWFHQRPGQSPRRLIYEVSNRDSGVPDRFTGSGSGTDFTLKISRVEAEDVGVYYCMQGTHWPGTFGQGTKLEIK

SEQ ID NO: 430 - protein, 239 aa, Artificial Sequence
  source: /note="Description of Artificial Sequence: Synthetic polypeptide"
QVQLVESGGGLVQPGGSLRLSCAVSGFALSNHGMSWVRRAPGKGLEWVSGIVYSGSTYYAASVKGRFTISRDNSRNTLYLQMNSLRPEDTAIYYCSAHGGESDVWGQGTTVTVSSASGGGGSGGRASGGGGSDIRLTQSPSPLSASVGDRVTITCQASEDINKFLNWYHQTPGKAPKLLIYDASTLQTGVPSRFSGSGSGTDFTLTINSLQPEDIGTYYCQQYESLPLTFGGGTKVEIK

SEQ ID NO: 431 - DNA, 717 bp, Artificial Sequence
  source: /note="Description of Artificial Sequence: Synthetic polynucleotide"
caagtgcaactcgtggaatctggtggaggactcgtgcaacccggtggaagccttaggctgtcgtgcgccgtcagcgggtttgctctgagcaaccatggaatgtcctgggtccgccgggcaccgggaaaagggctggaatgggtgtccggcatcgtgtacagcgggtcaacctattacgccgcgtccgtgaagggcagattcactatctcaagagacaacagccggaacaccctgtacttgcaaatgaattccctgcgccccgaggacaccgccatctactactgctccgcccacggaggagagtcggacgtgtggggccagggaacgactgtgactgtgtccagcgcatcaggagggggtggttcgggcggccgggcctcggggggaggaggttccgacattcggctgacccagtccccgtccccactgtcggcctccgtcggcgaccgcgtgaccatcacttgtcaggcgtccgaggacattaacaagttcctgaactggtaccaccagacccctggaaaggcccccaagctgctgatctacgatgcctcgacccttcaaactggagtgcctagccggttctccgggtccggctccggcactgatttcactctgaccatcaactcattgcagccggaagatatcgggacctactattgccagcagtacgaatccctcccgctcacattcggcgggggaaccaaggtcgagattaag

SEQ ID NO: 432 - protein, 115 aa, Artificial Sequence
  source: /note="Description of Artificial Sequence: Synthetic polypeptide"
QVQLVESGGGLVQPGGSLRLSCAVSGFALSNHGMSWVRRAPGKGLEWVSGIVYSGSTYYAASVKGRFTISRDNSRNTLYLQMNSLRPEDTAIYYCSAHGGESDVWGQGTTVTVSS

SEQ ID NO: 433 - protein, 107 aa, Artificial Sequence
  source: /note="Description of Artificial Sequence: Synthetic polypeptide"
DIRLTQSPSPLSASVGDRVTITCQASEDINKFLNWYHQTPGKAPKLLIYDASTLQTGVPSRFSGSGSGTDFTLTINSLQPEDIGTYYCQQYESLPLTFGGGTKVEIK

SEQ ID NO: 434 - protein, 240 aa, Artificial Sequence
  source: /note="Description of Artificial Sequence: Synthetic polypeptide"
EVQLVETGGGLVQPGGSLRLSCAVSGFALSNHGMSWVRRAPGKGLEWVSGIVYSGSTYYAASVKGRFTISRDNSRNTLYLQMNSLRPEDTAIYYCSAHGGESDVWGQGTTVTVSSASGGGGSGGRASGGGGSETTLTQSPATLSVSPGERATLSCRASQSVGSNLAWYQQKPGQGPRLLIYGASTRATGIPARFSGSGSGTEFTLTISSLQPEDFAVYYCQQYNDWLPVTFGQGTKVEIK

SEQ ID NO: 435 - DNA, 720 bp, Artificial Sequence
  source: /note="Description of Artificial Sequence: Synthetic polynucleotide"
gaagtgcaattggtggaaactggaggaggacttgtgcaacctggaggatcattgcggctctcatgcgctgtctccggcttcgccctgtcaaatcacgggatgtcgtgggtcagacgggccccgggaaagggtctggaatgggtgtcggggattgtgtacagcggctccacctactacgccgcttcggtcaagggccgcttcactatttcacgggacaacagccgcaacaccctctatctgcaaatgaactctctccgcccggaggataccgccatctactactgctccgcacacggcggcgaatccgacgtgtggggacagggaaccactgtcaccgtgtcgtccgcatccggtggcggaggatcgggtggccgggcctccgggggcggcggcagcgagactaccctgacccagtcccctgccactctgtccgtgagcccgggagagagagccacccttagctgccgggccagccagagcgtgggctccaacctggcctggtaccagcagaagccaggacagggtcccaggctgctgatctacggagcctccactcgcgcgaccggcatccccgcgaggttctccgggtcgggttccgggaccgagttcaccctgaccatctcctccctccaaccggaggacttcgcggtgtactactgtcagcagtacaacgattggctgcccgtgacatttggacaggggacgaaggtggaaatcaaa

SEQ ID NO: 436 - protein, 115 aa, Artificial Sequence; identical to SEQ ID NO: 416
  source: /note="Description of Artificial Sequence: Synthetic polypeptide"

SEQ ID NO: 437 - protein, 108 aa, Artificial Sequence
  source: /note="Description of Artificial Sequence: Synthetic polypeptide"
ETTLTQSPATLSVSPGERATLSCRASQSVGSNLAWYQQKPGQGPRLLIYGASTRATGIPARFSGSGSGTEFTLTISSLQPEDFAVYYCQQYNDWLPVTFGQGTKVEIK

SEQ ID NO: 438 - protein, 241 aa, Artificial Sequence
  source: /note="Description of Artificial Sequence: Synthetic polypeptide"
EVQLVESGGGLVQPGGSLRLSCAVSGFALSNHGMSWVRRAPGKGLEWVSGIVYSGSTYYAASVKGRFTISRDNSRNTLYLQMNSLRPEDTAIYYCSAHGGESDVWGQGTTVTVSSASGGGGSGGRASGGGGSEIVLTQSPGTLSLSPGERATLSCRASQSIGSSSLAWYQQKPGQAPRLLMYGASSRASGIPDRFSGSGSGTDFTLTISRLEPEDFAVYYCQQYAGSPPFTFGQGTKVEIK

SEQ ID NO: 439 - DNA, 723 bp, Artificial Sequence
  source: /note="Description of Artificial Sequence: Synthetic polynucleotide"
gaagtgcaattggtggaatctggtggaggacttgtgcaacctggaggatcactgagactgtcatgcgcggtgtccggttttgccctgagcaatcatgggatgtcgtgggtccggcgcgcccccggaaagggtctggaatgggtgtcgggtatcgtctactccgggagcacttactacgccgcgagcgtgaagggccgcttcaccatttcccgcgataactcccgcaacaccctgtacttgcaaatgaactcgctccggcctgaggacactgccatctactactgctccgcacacggaggagaatccgacgtgtggggccagggaactaccgtgaccgtcagcagcgcctccggcggcgggggctcaggcggacgggctagcggcggcggtggctccgagatcgtgctgacccagtcgcctggcactctctcgctgagccccggggaaagggcaaccctgtcctgtcgggccagccagtccattggatcatcctccctcgcctggtatcagcagaaaccgggacaggctccgcggctgcttatgtatggggccagctcaagagcctccggcattcccgaccggttctccgggtccggttccggcaccgatttcaccctgactatctcgaggctggagccagaggacttcgccgtgtactactgccagcagtacgcggggtccccgccgttcacgttcggacagggaaccaaggtcgagatcaag

SEQ ID NO: 440 - protein, 115 aa, Artificial Sequence; identical to SEQ ID NO: 384
  source: /note="Description of Artificial Sequence: Synthetic polypeptide"

SEQ ID NO: 441 - protein, 109 aa, Artificial Sequence
  source: /note="Description of Artificial Sequence: Synthetic polypeptide"
EIVLTQSPGTLSLSPGERATLSCRASQSIGSSSLAWYQQKPGQAPRLLMYGASSRASGIPDRFSGSGSGTDFTLTISRLEPEDFAVYYCQQYAGSPPFTFGQGTKVEIK

SEQ ID NO: 442 - protein, 243 aa, Artificial Sequence
  source: /note="Description of Artificial Sequence: Synthetic polypeptide"
QVQLQESGPGLVKPSETLSLTCTVSGGSISSSYYYWGWIRQPPGKGLEWIGSIYYSGSAYYNPSLKSRVTISVDTSKNQFSLRLSSVTAADTAVYYCARHWQEWPDAFDIWGQGTMVTVSSGGGGSGGGGSGGGGSETTLTQSPAFMSATPGDKVIISCKASQDIDDAMNWYQQKPGEAPLFIIQSATSPVPGIPPRFSGSGFGTDFSLTINNIESEDAAYYFCLQHDNFPLTFGQGTKLEIK

SEQ ID NO: 443 - DNA, 729 bp, Artificial Sequence
  source: /note="Description of Artificial Sequence: Synthetic polynucleotide"
caagtgcagcttcaggaaagcggaccgggcctggtcaagccatccgaaactctctccctgacttgcactgtgtctggcggttccatctcatcgtcgtactactactggggctggattaggcagccgcccggaaagggactggagtggatcggaagcatctactattccggctcggcgtactacaaccctagcctcaagtcgagagtgaccatctccgtggatacctccaagaaccagttttccctgcgcctgagctccgtgaccgccgctgacaccgccgtgtactactgtgctcggcattggcaggaatggcccgatgccttcgacatttggggccagggcactatggtcactgtgtcatccgggggtggaggcagcgggggaggagggtccggggggggaggttcagagacaaccttgacccagtcacccgcattcatgtccgccactccgggagacaaggtcatcatctcgtgcaaagcgtcccaggatatcgacgatgccatgaattggtaccagcagaagcctggcgaagcgccgctgttcattatccaatccgcaacctcgcccgtgcctggaatcccaccgcggttcagcggcagcggtttcggaaccgacttttccctgaccattaacaacattgagtccgaggacgccgcctactacttctgcctgcaacacgacaacttccctctcacgttcggccagggaaccaagctggaaatcaag

SEQ ID NO: 444 - protein, 121 aa, Artificial Sequence
  source: /note="Description of Artificial Sequence: Synthetic polypeptide"
QVQLQESGPGLVKPSETLSLTCTVSGGSISSSYYYWGWIRQPPGKGLEWIGSIYYSGSAYYNPSLKSRVTISVDTSKNQFSLRLSSVTAADTAVYYCARHWQEWPDAFDIWGQGTMVTVSS

SEQ ID NO: 445 - protein, 107 aa, Artificial Sequence
  source: /note="Description of Artificial Sequence: Synthetic polypeptide"
ETTLTQSPAFMSATPGDKVIISCKASQDIDDAMNWYQQKPGEAPLFIIQSATSPVPGIPPRFSGSGFGTDFSLTINNIESEDAAYYFCLQHDNFPLTFGQGTKLEIK

SEQ ID NO: 446 - protein, 245 aa, Artificial Sequence
  source: /note="Description of Artificial Sequence: Synthetic polypeptide"
QVNLRESGPALVKPTQTLTLTCTFSGFSLRTSGMCVSWIRQPPGKALEWLARIDWDEDKFYSTSLKTRLTISKDTSDNQVVLRMTNMDPADTATYYCARSGAGGTSATAFDIWGPGTMVTVSSGGGGSGGGGSGGGGSDIQMTQSPSSLSASVGDRVTITCRASQDIYNNLAWFQLKPGSAPRSLMYAANKSQSGVPSRFSGSASGTDFTLTISSLQPEDFATYYCQHYYRFPYSFGQGTKLEIK

SEQ ID NO: 447 - DNA, 735 bp, Artificial Sequence
  source: /note="Description of Artificial Sequence: Synthetic polynucleotide"
caagtcaatctgcgcgaatccggccccgccttggtcaagcctacccagaccctcactctgacctgtactttctccggcttctccctgcggacttccgggatgtgcgtgtcctggatcagacagcctccgggaaaggccctggagtggctcgctcgcattgactgggatgaggacaagttctactccacctcactcaagaccaggctgaccatcagcaaagatacctctgacaaccaagtggtgctccgcatgaccaacatggacccagccgacactgccacttactactgcgcgaggagcggagcgggcggaacctccgccaccgccttcgatatttggggcccgggtaccatggtcaccgtgtcaagcggaggaggggggtccgggggcggcggttccgggggaggcggatcggacattcagatgactcagtcaccatcgtccctgagcgctagcgtgggcgacagagtgacaatcacttgccgggcatcccaggacatctataacaaccttgcgtggttccagctgaagcctggttccgcaccgcggtcacttatgtacgccgccaacaagagccagtcgggagtgccgtcccggttttccggttcggcctcgggaactgacttcaccctgacgatctccagcctgcaacccgaggatttcgccacctactactgccagcactactaccgctttccctactcgttcggacagggaaccaagctggaaatcaag

SEQ ID NO: 448 - protein, 123 aa, Artificial Sequence
  source: /note="Description of Artificial Sequence: Synthetic polypeptide"
QVNLRESGPALVKPTQTLTLTCTFSGFSLRTSGMCVSWIRQPPGKALEWLARIDWDEDKFYSTSLKTRLTISKDTSDNQVVLRMTNMDPADTATYYCARSGAGGTSATAFDIWGPGTMVTVSS

SEQ ID NO: 449 - protein, 107 aa, Artificial Sequence
  source: /note="Description of Artificial Sequence: Synthetic polypeptide"
DIQMTQSPSSLSASVGDRVTITCRASQDIYNNLAWFQLKPGSAPRSLMYAANKSQSGVPSRFSGSASGTDFTLTISSLQPEDFATYYCQHYYRFPYSFGQGTKLEIK

SEQ ID NO: 450 - protein, 246 aa, Artificial Sequence
  source: /note="Description of Artificial Sequence: Synthetic polypeptide"
EVQLVESGGGLVKPGGSLRLSCAASGFTFSSYSMNWVRQAPGKGLEWVSSISSSSSYIYYADSVKGRFTISRDNAKNSLYLQMNSLRAEDTAVYYCAKTIAAVYAFDIWGQGTTVTVSSGGGGSGGGGSGGGGSEIVLTQSPLSLPVTPEEPASISCRSSQSLLHSNGYNYLDWYLQKPGQSPQLLIYLGSNRASGVPDRFSGSGSGTDFTLKISRVEAEDVGVYYCMQALQTPYTFGQGTKLEIK

SEQ ID NO: 451 - DNA, 738 bp, Artificial Sequence
  source: /note="Description of Artificial Sequence: Synthetic polynucleotide"
gaagtgcagcttgtcgaatccggggggggactggtcaagccgggcggatcactgagactgtcctgcgccgcgagcggcttcacgttctcctcctactccatgaactgggtccgccaagcccccgggaagggactggaatgggtgtcctctatctcctcgtcgtcgtcctacatctactacgccgactccgtgaagggaagattcaccatttcccgcgacaacgcaaagaactcactgtacttgcaaatgaactcactccgggccgaagatactgctgtgtactattgcgccaagactattgccgccgtctacgctttcgacatctggggccagggaaccaccgtgactgtgtcgtccggtggtggtggctcgggcggaggaggaagcggcggcggggggtccgagattgtgctgacccagtcgccactgagcctccctgtgacccccgaggaacccgccagcatcagctgccggtccagccagtccctgctccactccaacggatacaattacctcgattggtaccttcagaagcctggacaaagcccgcagctgctcatctacttgggatcaaaccgcgcgtcaggagtgcctgaccggttctccggctcgggcagcggtaccgatttcaccctgaaaatctccagggtggaggcagaggacgtgggagtgtattactgtatgcaggcgctgcagactccgtacacatttgggcagggcaccaagctggagatcaag

SEQ ID NO: 452 - protein, 119 aa, Artificial Sequence
  source: /note="Description of Artificial Sequence: Synthetic polypeptide"
EVQLVESGGGLVKPGGSLRLSCAASGFTFSSYSMNWVRQAPGKGLEWVSSISSSSSYIYYADSVKGRFTISRDNAKNSLYLQMNSLRAEDTAVYYCAKTIAAVYAFDIWGQGTTVTVSS

SEQ ID NO: 453 - protein, 112 aa, Artificial Sequence
  source: /note="Description of Artificial Sequence: Synthetic polypeptide"
EIVLTQSPLSLPVTPEEPASISCRSSQSLLHSNGYNYLDWYLQKPGQSPQLLIYLGSNRASGVPDRFSGSGSGTDFTLKISRVEAEDVGVYYCMQALQTPYTFGQGTKLEIK

SEQ ID NO: 454 - protein, 240 aa, Artificial Sequence
  source: /note="Description of Artificial Sequence: Synthetic polypeptide"
EVQLVESGGGLVKPGGSLRLSCAASGFTFSDYYMSWIRQAPGKGLEWVSYISSSGSTIYYADSVKGRFTISRDNAKNSLYLQMNSLRAEDTAVYYCARDLRGAFDIWGQGTMVTVSSGGGGSGGGGSGGGGSSYVLTQSPSVSAAPGYTATISCGGNNIGTKSVHWYQQKPGQAPLLVIRDDSVRPSKIPGRFSGSNSGNMATLTISGVQAGDEADFYCQVWDSDSEHVVFGGGTKLTVL

SEQ ID NO: 455 - DNA, 720 bp, Artificial Sequence
  source: /note="Description of Artificial Sequence: Synthetic polynucleotide"
gaagtccagctcgtggagtccggcggaggccttgtgaagcctggaggttcgctgagactgtcctgcgccgcctccggcttcaccttctccgactactacatgtcctggatcagacaggccccgggaaagggcctggaatgggtgtcctacatctcgtcatcgggcagcactatctactacgcggactcagtgaaggggcggttcaccatttcccgggataacgcgaagaactcgctgtatctgcaaatgaactcactgagggccgaggacaccgccgtgtactactgcgcccgcgatctccgcggggcatttgacatctggggacagggaaccatggtcacagtgtccagcggagggggaggatcgggtggcggaggttccgggggtggaggctcctcctacgtgctgactcagagcccaagcgtcagcgctgcgcccggttacacggcaaccatctcctgtggcggaaacaacattgggaccaagtctgtgcactggtatcagcagaagccgggccaagctcccctgttggtgatccgcgatgactccgtgcggcctagcaaaattccgggacggttctccggctccaacagcggcaatatggccactctcaccatctcgggagtgcaggccggagatgaagccgacttctactgccaagtctgggactcagactccgagcatgtggtgttcgggggcggaaccaagctgactgtgctc

SEQ ID NO: 456 - protein, 117 aa, Artificial Sequence
  source: /note="Description of Artificial Sequence: Synthetic polypeptide"
EVQLVESGGGLVKPGGSLRLSCAASGFTFSDYYMSWIRQAPGKGLEWVSYISSSGSTIYYADSVKGRFTISRDNAKNSLYLQMNSLRAEDTAVYYCARDLRGAFDIWGQGTMVTVSS

SEQ ID NO: 457 - protein, 108 aa, Artificial Sequence
  source: /note="Description of Artificial Sequence: Synthetic polypeptide"
SYVLTQSPSVSAAPGYTATISCGGNNIGTKSVHWYQQKPGQAPLLVIRDDSVRPSKIPGRFSGSNSGNMATLTISGVQAGDEADFYCQVWDSDSEHVVFGGGTKLTVL

SEQ ID NO: 458 - protein, 241 aa, Artificial Sequence
  source: /note="Description of Artificial Sequence: Synthetic polypeptide"
QVQLVQSGAEVKKPGASVKVSCKPSGYTVTSHYIHWVRRAPGQGLEWMGMINPSGGVTAYSQTLQGRVTMTSDTSSSTVYMELSSLRSEDTAMYYCAREGSGSGWYFDFWGRGTLVTVSSGGGGSGGGGSGGGGSSYVLTQPPSVSVSPGQTASITCSGDGLSKKYVSWYQQKAGQSPVVLISRDKERPSGIPDRFSGSNSADTATLTISGTQAMDEADYYCQAWDDTTVVFGGGTKLTVL

SEQ ID NO: 459 - DNA, 723 bp, Artificial Sequence
  source: /note="Description of Artificial Sequence: Synthetic polynucleotide"
caagtgcagctggtgcagagcggggccgaagtcaagaagccgggagcctccgtgaaagtgtcctgcaagccttcgggatacaccgtgacctcccactacattcattgggtccgccgcgcccccggccaaggactcgagtggatgggcatgatcaaccctagcggcggagtgaccgcgtacagccagacgctgcagggacgcgtgactatgacctcggatacctcctcctccaccgtctatatggaactgtccagcctgcggtccgaggataccgccatgtactactgcgcccgggaaggatcaggctccgggtggtatttcgacttctggggaagaggcaccctcgtgactgtgtcatctgggggagggggttccggtggtggcggatcgggaggaggcggttcatcctacgtgctgacccagccaccctccgtgtccgtgagccccggccagactgcatcgattacatgtagcggcgacggcctctccaagaaatacgtgtcgtggtaccagcagaaggccggacagagcccggtggtgctgatctcaagagataaggagcggcctagcggaatcccggacaggttctcgggttccaactccgcggacactgctactctgaccatctcggggacccaggctatggacgaagccgattactactgccaagcctgggacgacactactgtcgtgtttggagggggcaccaagttgaccgtcctt

SEQ ID NO: 460 - protein, 120 aa, Artificial Sequence
  source: /note="Description of Artificial Sequence: Synthetic polypeptide"
QVQLVQSGAEVKKPGASVKVSCKPSGYTVTSHYIHWVRRAPGQGLEWMGMINPSGGVTAYSQTLQGRVTMTSDTSSSTVYMELSSLRSEDTAMYYCAREGSGSGWYFDFWGRGTLVTVSS

SEQ ID NO: 461 - protein, 106 aa, Artificial Sequence
  source: /note="Description of Artificial Sequence: Synthetic polypeptide"
SYVLTQPPSVSVSPGQTASITCSGDGLSKKYVSWYQQKAGQSPVVLISRDKERPSGIPDRFSGSNSADTATLTISGTQAMDEADYYCQAWDDTTVVFGGGTKLTVL

SEQ ID NO: 462 - protein, 245 aa, Artificial Sequence
  source: /note="Description of Artificial Sequence: Synthetic polypeptide"
QVQLQESGPGLVKPSQTLSLTCTVSGGSISSGGYYWSWIRQHPGKGLEWIGYIYYSGSTYYNPSLKSRVTISVDTSKNQFSLKLSSVTAADTAVYYCARAGIAARLRGAFDIWGQGTMVTVSSGGGGSGGGGSGGGGSDIVMTQSPSSVSASVGDRVIITCRASQGIRNWLAWYQQKPGKAPNLLIYAASNLQSGVPSRFSGSGSGADFTLTISSLQPEDVATYYCQKYNSAPFTFGPGTKVDIK

SEQ ID NO: 463 - DNA, 735 bp, Artificial Sequence
  source: /note="Description of Artificial Sequence: Synthetic polynucleotide"
caagtgcagcttcaggagagcggcccgggactcgtgaagccgtcccagaccctgtccctgacttgcaccgtgtcgggaggaagcatctcgagcggaggctactattggtcgtggattcggcagcaccctggaaagggcctggaatggatcggctacatctactactccggctcgacctactacaacccatcgctgaagtccagagtgacaatctcagtggacacgtccaagaatcagttcagcctgaagctctcttccgtgactgcggccgacaccgccgtgtactactgcgcacgcgctggaattgccgcccggctgaggggtgccttcgacatttggggacagggcaccatggtcaccgtgtcctccggcggcggaggttccgggggtggaggctcaggaggaggggggtccgacatcgtcatgactcagtcgccctcaagcgtcagcgcgtccgtcggggacagagtgatcatcacctgtcgggcgtcccagggaattcgcaactggctggcctggtatcagcagaagcccggaaaggcccccaacctgttgatctacgccgcctcaaacctccaatccggggtgccgagccgcttcagcggctccggttcgggtgccgatttcactctgaccatctcctccctgcaacctgaagatgtggctacctactactgccaaaagtacaactccgcaccttttactttcggaccggggaccaaagtggacattaag

SEQ ID NO: 464 - protein, 123 aa, Artificial Sequence
  source: /note="Description of Artificial Sequence: Synthetic polypeptide"
QVQLQESGPGLVKPSQTLSLTCTVSGGSISSGGYYWSWIRQHPGKGLEWIGYIYYSGSTYYNPSLKSRVTISVDTSKNQFSLKLSSVTAADTAVYYCARAGIAARLRGAFDIWGQGTMVTVSS

SEQ ID NO: 465 - protein, 107 aa, Artificial Sequence
  source: /note="Description of Artificial Sequence: Synthetic polypeptide"
DIVMTQSPSSVSASVGDRVIITCRASQGIRNWLAWYQQKPGKAPNLLIYAASNLQSGVPSRFSGSGSGADFTLTISSLQPEDVATYYCQKYNSAPFTFGPGTKVDIK

SEQ ID NO: 466 - protein, 253 aa, Artificial Sequence
  source: /note="Description of Artificial Sequence: Synthetic polypeptide"
QVQLVQSGAEVKKPGSSVKVSCKASGGTFSSYAISWVRQAPGQGLEWMGGIIPIFGTANYAQKFQGRVTITADESTSTAYMELSSLRSEDTAVYYCARRGGYQLLRWDVGLLRSAFDIWGQGTMVTVSSGGGGSGGGGSGGGGSSYVLTQPPSVSVAPGQTARITCGGNNIGSKSVHWYQQKPGQAPVLVLYGKNNRPSGVPDRFSGSRSGTTASLTITGAQAEDEADYYCSSRDSSGDHLRVFGTGTKVTVL

SEQ ID NO: 467 - DNA, 759 bp, Artificial Sequence
  source: /note="Description of Artificial Sequence: Synthetic polynucleotide"
caagtgcagctggtccagtcgggcgccgaggtcaagaagcccgggagctctgtgaaagtgtcctgcaaggcctccgggggcacctttagctcctacgccatctcctgggtccgccaagcaccgggtcaaggcctggagtggatggggggaattatccctatcttcggcactgccaactacgcccagaagttccagggacgcgtgaccattaccgcggacgaatccacctccaccgcttatatggagctgtccagcttgcgctcggaagataccgccgtgtactactgcgcccggaggggtggataccagctgctgagatgggacgtgggcctcctgcggtcggcgttcgacatctggggccagggcactatggtcactgtgtccagcggaggaggcggatcgggaggcggcggatcagggggaggcggttccagctacgtgcttactcaacccccttcggtgtccgtggccccgggacagaccgccagaatcacttgcggaggaaacaacattgggtccaagagcgtgcattggtaccagcagaagccaggacaggcccctgtgctggtgctctacgggaagaacaatcggcccagcggagtgccggacaggttctcgggttcacgctccggtacaaccgcttcactgactatcaccggggcccaggcagaggatgaagcggactactactgttcctcccgggattcatccggcgaccacctccgggtgttcggaaccggaacgaaggtcaccgtgctg

SEQ ID NO: 468 - protein, 129 aa, Artificial Sequence
  source: /note="Description of Artificial Sequence: Synthetic polypeptide"
QVQLVQSGAEVKKPGSSVKVSCKASGGTFSSYAISWVRQAPGQGLEWMGGIIPIFGTANYAQKFQGRVTITADESTSTAYMELSSLRSEDTAVYYCARRGGYQLLRWDVGLLRSAFDIWGQGTMVTVSS

SEQ ID NO: 469 - protein, 109 aa, Artificial Sequence
  source: /note="Description of Artificial Sequence: Synthetic polypeptide"
SYVLTQPPSVSVAPGQTARITCGGNNIGSKSVHWYQQKPGQAPVLVLYGKNNRPSGVPDRFSGSRSGTTASLTITGAQAEDEADYYCSSRDSSGDHLRVFGTGTKVTVL

SEQ ID NO: 470 - protein, 248 aa, Artificial Sequence
  source: /note="Description of Artificial Sequence: Synthetic polypeptide"
EVQLQQSGPGLVKPSQTLSLTCAISGDSVSSNSAAWNWIRQSPSRGLEWLGRTYYRSKWYSFYAISLKSRIIINPDTSKNQFSLQLKSVTPEDTAVYYCARSSPEGLFLYWFDPWGQGTLVTVSSGGDGSGGGGSGGGGSSSELTQDPAVSVALGQTIRITCQGDSLGNYYATWYQQKPGQAPVLVIYGTNNRPSGIPDRFSASSSGNTASLTITGAQAEDEADYYCNSRDSSGHHLLFGTGTKVTVL

SEQ ID NO: 471 - DNA, 744 bp, Artificial Sequence
  source: /note="Description of Artificial Sequence: Synthetic polynucleotide"
gaagtgcagctccaacagtcaggaccggggctcgtgaagccatcccagaccctgtccctgacttgtgccatctcgggagatagcgtgtcatcgaactccgccgcctggaactggattcggcagagcccgtcccgcggactggagtggcttggaaggacctactaccggtccaagtggtactctttctacgcgatctcgctgaagtcccgcattatcattaaccctgatacctccaagaatcagttctccctccaactgaaatccgtcacccccgaggacacagcagtgtattactgcgcacggagcagccccgaaggactgttcctgtattggtttgacccctggggccaggggactcttgtgaccgtgtcgagcggcggagatgggtccggtggcggtggttcggggggcggcggatcatcatccgaactgacccaggacccggctgtgtccgtggcgctgggacaaaccatccgcattacgtgccagggagactccctgggcaactactacgccacttggtaccagcagaagccgggccaagcccctgtgttggtcatctacgggaccaacaacagaccttccggcatccccgaccggttcagcgcttcgtcctccggcaacactgccagcctgaccatcactggagcgcaggccgaagatgaggccgactactactgcaacagcagagactcctcgggtcatcacctcttgttcggaactggaaccaaggtcaccgtgctg

SEQ ID NO: 472 - protein, 125 aa, Artificial Sequence
  source: /note="Description of Artificial Sequence: Synthetic polypeptide"
EVQLQQSGPGLVKPSQTLSLTCAISGDSVSSNSAAWNWIRQSPSRGLEWLGRTYYRSKWYSFYAISLKSRIIINPDTSKNQFSLQLKSVTPEDTAVYYCARSSPEGLFLYWFDPWGQGTLVTVSS

SEQ ID NO: 473 - protein, 108 aa, Artificial Sequence
  source: /note="Description of Artificial Sequence: Synthetic polypeptide"
SSELTQDPAVSVALGQTIRITCQGDSLGNYYATWYQQKPGQAPVLVIYGTNNRPSGIPDRFSASSSGNTASLTITGAQAEDEADYYCNSRDSSGHHLLFGTGTKVTVL

SEQ ID NO: 474 - protein, 246 aa, Artificial Sequence
  source: /note="Description of Artificial Sequence: Synthetic polypeptide"
EVQLVESGGGLVQPGGSLRLSCAASGFTFSSYAMSWVRQAPGKGLEWVSAISGSGGSTYYADSVKGRFTISRDNSKNTLYLQMNSLRAEDTAVYYCAKVEGSGSLDYWGQGTLVTVSSGGGGSGGGGSGGGGSEIVMTQSPGTLSLSPGERATLSCRASQSVSSAYLAWYQQKPGQPPRLLISGASTRATGIPDRFGGSGSGTDFTLTISRLEPEDFAVYYCQHYGSSFNGSSLFTFGQGTRLEIK

SEQ ID NO: 475 - DNA, 738 bp, Artificial Sequence
  source: /note="Description of Artificial Sequence: Synthetic polynucleotide"
gaagtgcagctcgtggagtcaggaggcggcctggtccagccgggagggtcccttagactgtcatgcgccgcaagcggattcactttctcctcctatgccatgagctgggtccgccaagcccccggaaagggactggaatgggtgtccgccatctcggggtctggaggctcaacttactacgctgactccgtgaagggacggttcaccattagccgcgacaactccaagaacaccctctacctccaaatgaactccctgcgggccgaggataccgccgtctactactgcgccaaagtggaaggttcaggatcgctggactactggggacagggtactctcgtgaccgtgtcatcgggcggaggaggttccggcggtggcggctccggcggcggagggtcggagatcgtgatgacccagagccctggtactctgagcctttcgccgggagaaagggccaccctgtcctgccgcgcttcccaatccgtgtcctccgcgtacttggcgtggtaccagcagaagccgggacagccccctcggctgctgatcagcggggccagcacccgggcaaccggaatcccagacagattcgggggttccggcagcggcacagatttcaccctgactatttcgaggttggagcccgaggactttgcggtgtattactgtcagcactacgggtcgtcctttaatggctccagcctgttcacgttcggacaggggacccgcctggaaatcaag

SEQ ID NO: 476 - protein, 118 aa, Artificial Sequence
  source: /note="Description of Artificial Sequence: Synthetic polypeptide"
EVQLVESGGGLVQPGGSLRLSCAASGFTFSSYAMSWVRQAPGKGLEWVSAISGSGGSTYYADSVKGRFTISRDNSKNTLYLQMNSLRAEDTAVYYCAKVEGSGSLDYWGQGTLVTVSS

SEQ ID NO: 477 - protein, 113 aa, Artificial Sequence
  source: /note="Description of Artificial Sequence: Synthetic polypeptide"
EIVMTQSPGTLSLSPGERATLSCRASQSVSSAYLAWYQQKPGQPPRLLISGASTRATGIPDRFGGSGSGTDFTLTISRLEPEDFAVYYCQHYGSSFNGSSLFTFGQGTRLEIK

SEQ ID NO: 478 - protein, 241 aa, Artificial Sequence
  source: /note="Description of Artificial Sequence: Synthetic polypeptide"
EVQLVETGGGLVQPGGSLRLSCAASGITFSRYPMSWVRQAPGKGLEWVSGISDSGVSTYYADSAKGRFTISRDNSKNTLFLQMSSLRDEDTAVYYCVTRAGSEASDIWGQGTMVTVSSGGGGSGGGGSGGGGSEIVLTQSPATLSLSPGERATLSCRASQSVSNSLAWYQQKPGQAPRLLIYDASSRATGIPDRFSGSGSGTDFTLTISRLEPEDFAIYYCQQFGTSSGLTFGGGTKLEIK

SEQ ID NO: 479 - DNA, 723 bp, Artificial Sequence
  source: /note="Description of Artificial Sequence: Synthetic polynucleotide"
gaagtgcaactggtggaaaccggtggcggcctggtgcagcctggaggatcattgaggctgtcatgcgcggccagcggtattaccttctcccggtaccccatgtcctgggtcagacaggccccggggaaagggcttgaatgggtgtccgggatctcggactccggtgtcagcacttactacgccgactccgccaagggacgcttcaccatttcccgggacaactcgaagaacaccctgttcctccaaatgagctccctccgggacgaggatactgcagtgtactactgcgtgacccgcgccgggtccgaggcgtctgacatttggggacagggcactatggtcaccgtgtcgtccggcggagggggctcgggaggcggtggcagcggaggaggagggtccgagatcgtgctgacccaatccccggccaccctctcgctgagccctggagaaagggcaaccttgtcctgtcgcgcgagccagtccgtgagcaactccctggcctggtaccagcagaagcccggacaggctccgagacttctgatctacgacgcttcgagccgggccactggaatccccgaccgcttttcggggtccggctcaggaaccgatttcaccctgacaatctcacggctggagccagaggatttcgccatctattactgccagcagttcggtacttcctccggcctgactttcggaggcggcacgaagctcgaaatcaag

SEQ ID NO: 480 - protein, 118 aa, Artificial Sequence
  source: /note="Description of Artificial Sequence: Synthetic polypeptide"
EVQLVETGGGLVQPGGSLRLSCAASGITFSRYPMSWVRQAPGKGLEWVSGISDSGVSTYYADSAKGRFTISRDNSKNTLFLQMSSLRDEDTAVYYCVTRAGSEASDIWGQGTMVTVSS

SEQ ID NO: 481 - protein, 108 aa, Artificial Sequence
  source: /note="Description of Artificial Sequence: Synthetic polypeptide"
EIVLTQSPATLSLSPGERATLSCRASQSVSNSLAWYQQKPGQAPRLLIYDASSRATGIPDRFSGSGSGTDFTLTISRLEPEDFAIYYCQQFGTSSGLTFGGGTKLEIK

SEQ ID NO: 482 - protein, 248 aa, Artificial Sequence
  source: /note="Description of Artificial Sequence: Synthetic polypeptide"
QVQLVESGGGLVQPGGSLRLSCAASGFTFSSYAMSWVRQAPGKGLEWVSAISGSGGSTYYADSVKGRFTISRDNAKNSLYLQMNSLRAEDTAIYYCARATYKRELRYYYGMDVWGQGTMVTVSSGGGGSGGGGSGGGGSEIVMTQSPGTVSLSPGERATLSCRASQSVSSSFLAWYQQKPGQAPRLLIYGASSRATGIPDRFSGSGSGTDFTLTISRLEPEDSAVYYCQQYHSSPSWTFGQGTRLEIK

SEQ ID NO: 483 - DNA, 744 bp, Artificial Sequence
  source: /note="Description of Artificial Sequence: Synthetic polynucleotide"
caagtgcagctcgtggaatcgggtggcggactggtgcagccggggggctcacttagactgtcctgcgcggccagcggattcactttctcctcctacgccatgtcctgggtcagacaggcccctggaaagggcctggaatgggtgtccgcaatcagcggcagcggcggctcgacctattacgcggattcagtgaagggcagattcaccatttcccgggacaacgccaagaactccttgtaccttcaaatgaactccctccgcgcggaagataccgcaatctactactgcgctcgggccacttacaagagggaactgcgctactactacgggatggacgtctggggccagggaaccatggtcaccgtgtccagcggaggaggaggatcgggaggaggcggtagcgggggtggagggtcggagatcgtgatgacccagtcccccggcactgtgtcgctgtcccccggcgaacgggccaccctgtcatgtcgggccagccagtcagtgtcgtcaagcttcctcgcctggtaccagcagaaaccgggacaagctccccgcctgctgatctacggagccagcagccgggccaccggtattcctgaccggttctccggttcggggtccgggaccgactttactctgactatctctcgcctcgagccagaggactccgccgtgtattactgccagcagtaccactcctccccgtcctggacgttcggacagggcacaaggctggagattaag

SEQ ID NO: 484 - protein, 124 aa, Artificial Sequence
  source: /note="Description of Artificial Sequence: Synthetic polypeptide"
QVQLVESGGGLVQPGGSLRLSCAASGFTFSSYAMSWVRQAPGKGLEWVSAISGSGGSTYYADSVKGRFTISRDNAKNSLYLQMNSLRAEDTAIYYCARATYKRELRYYYGMDVWGQGTMVTVSS

SEQ ID NO: 485 - protein, 109 aa, Artificial Sequence
  source: /note="Description of Artificial Sequence: Synthetic polypeptide"
EIVMTQSPGTVSLSPGERATLSCRASQSVSSSFLAWYQQKPGQAPRLLIYGASSRATGIPDRFSGSGSGTDFTLTISRLEPEDSAVYYCQQYHSSPSWTFGQGTRLEIK

SEQ ID NO: 486 - protein, 248 aa, Artificial Sequence
  source: /note="Description of Artificial Sequence: Synthetic polypeptide"
EVQLVETGGGLVQPGGSLRLSCAASGFTFSSYAMSWVRQAPGKGLEWVSAISGSGGSTYYADSVKGRFTISRDNSKNTLYLQMNTLKAEDTAVYYCARATYKRELRYYYGMDVWGQGTTVTVSSGGGGSGGGGSGGGGSEIVLTQSPSTLSLSPGESATLSCRASQSVSTTFLAWYQQKPGQAPRLLIYGSSNRATGIPDRFSGSGSGTDFTLTIRRLEPEDFAVYYCQQYHSSPSWTFGQGTKVEIK

SEQ ID NO: 487 - DNA, 744 bp, Artificial Sequence
  source: /note="Description of Artificial Sequence: Synthetic polynucleotide"
gaggtgcagcttgtggaaaccggtggcggactggtgcagcccggaggaagcctcaggctgtcctgcgccgcgtccggcttcaccttctcctcgtacgccatgtcctgggtccgccaggcccccggaaagggcctggaatgggtgtccgccatctctggaagcggaggttccacgtactacgcggacagcgtcaagggaaggttcacaatctcccgcgataattcgaagaacactctgtaccttcaaatgaacaccctgaaggccgaggacactgctgtgtactactgcgcacgggccacctacaagagagagctccggtactactacggaatggacgtctggggccagggaactactgtgaccgtgtcctcgggagggggtggctccggggggggcggctccggcggaggcggttccgagattgtgctgacccagtcaccttcaactctgtcgctgtccccgggagagagcgctactctgagctgccgggccagccagtccgtgtccaccaccttcctcgcctggtatcagcagaagccggggcaggcaccacggctcttgatctacgggtcaagcaacagagcgaccggaattcctgaccgcttctcggggagcggttcaggcaccgacttcaccctgactatccggcgcctggaacccgaagatttcgccgtgtattactgtcaacagtaccactcctcgccgtcctggacctttggccaaggaaccaaagtggaaatcaag

SEQ ID NO: 488 - protein, 124 aa, Artificial Sequence
  source: /note="Description of Artificial Sequence: Synthetic polypeptide"
EVQLVETGGGLVQPGGSLRLSCAASGFTFSSYAMSWVRQAPGKGLEWVSAISGSGGSTYYADSVKGRFTISRDNSKNTLYLQMNTLKAEDTAVYYCARATYKRELRYYYGMDVWGQGTTVTVSS

SEQ ID NO: 489 - protein, 109 aa, Artificial Sequence
  source: /note="Description of Artificial Sequence: Synthetic polypeptide"
EIVLTQSPSTLSLSPGESATLSCRASQSVSTTFLAWYQQKPGQAPRLLIYGSSNRATGIPDRFSGSGSGTDFTLTIRRLEPEDFAVYYCQQYHSSPSWTFGQGTKVEIK

SEQ ID NO: 490 - protein, 239 aa, Artificial Sequence
  source: /note="Description of Artificial Sequence: Synthetic polypeptide"
EVQLVETGGGLVQPGRSLRLSCAASGFTFDDYAMHWVRQAPGKGLEWVSGISWNSGSIGYADSVKGRFTISRDNAKNSLYLQMNSLRDEDTAVYYCARVGKAVPDVWGQGTTVTVSSGGGGSGGGGSGGGGSDIVMTQTPSSLSASVGDRVTITCRASQSISSYLNWYQQKPGKAPKLLIYAASSLQSGVPSRFSGSGSGTDFTLTISSLQPEDFATYYCQQSYSTPYSFGQGTRLEIK

SEQ ID NO: 491 - DNA, 717 bp, Artificial Sequence
  source: /note="Description of Artificial Sequence: Synthetic polynucleotide"
gaagtgcagctcgtggaaactggaggtggactcgtgcagcctggacggtcgctgcggctgagctgcgctgcatccggcttcaccttcgacgattatgccatgcactgggtcagacaggcgccagggaagggacttgagtgggtgtccggtatcagctggaatagcggctcaatcggatacgcggactccgtgaagggaaggttcaccatttcccgcgacaacgccaagaactccctgtacttgcaaatgaacagcctccgggatgaggacactgccgtgtactactgcgcccgcgtcggaaaagctgtgcccgacgtctggggccagggaaccactgtgaccgtgtccagcggcgggggtggatcgggcggtggagggtccggtggagggggctcagatattgtgatgacccagaccccctcgtccctgtccgcctcggtcggcgaccgcgtgactatcacatgtagagcctcgcagagcatctccagctacctgaactggtatcagcagaagccggggaaggccccgaagctcctgatctacgcggcatcatcactgcaatcgggagtgccgagccggttttccgggtccggctccggcaccgacttcacgctgaccatttcttccctgcaacccgaggacttcgccacttactactgccagcagtcctactccaccccttactccttcggccaaggaaccaggctggaaatcaag

SEQ ID NO: 492 - protein, 117 aa, Artificial Sequence
  source: /note="Description of Artificial Sequence: Synthetic polypeptide"
EVQLVETGGGLVQPGRSLRLSCAASGFTFDDYAMHWVRQAPGKGLEWVSGISWNSGSIGYADSVKGRFTISRDNAKNSLYLQMNSLRDEDTAVYYCARVGKAVPDVWGQGTTVTVSS

SEQ ID NO: 493 - protein, 107 aa, Artificial Sequence
  source: /note="Description of Artificial Sequence: Synthetic polypeptide"
DIVMTQTPSSLSASVGDRVTITCRASQSISSYLNWYQQKPGKAPKLLIYAASSLQSGVPSRFSGSGSGTDFTLTISSLQPEDFATYYCQQSYSTPYSFGQGTRLEIK

SEQ ID NO: 494 - protein, 246 aa, Artificial Sequence
  source: /note="Description of Artificial Sequence: Synthetic polypeptide"
EVQLVESGGGLVQPGRSLRLSCTASGFTFDDYAMHWVRQRPGKGLEWVASINWKGNSLAYGDSVKGRFAISRDNAKNTVFLQMNSLRTEDTAVYYCASHQGVAYYNYAMDVWGRGTLVTVSSGGGGSGGGGSGGGGSEIVLTQSPGTLSLSPGERATLSCRATQSIGSSFLAWYQQRPGQAPRLLIYGASQRATGIPDRFSGRGSGTDFTLTISRVEPEDSAVYYCQHYESSPSWTFGQGTKVEIK

SEQ ID NO: 495 - DNA, 738 bp, Artificial Sequence
  source: /note="Description of Artificial Sequence: Synthetic polynucleotide"
gaagtgcagctcgtggagagcgggggaggattggtgcagcccggaaggtccctgcggctctcctgcactgcgtctggcttcaccttcgacgactacgcgatgcactgggtcagacagcgcccgggaaagggcctggaatgggtcgcctcaatcaactggaagggaaactccctggcctatggcgacagcgtgaagggccgcttcgccatttcgcgcgacaacgccaagaacaccgtgtttctgcaaatgaattccctgcggaccgaggataccgctgtgtactactgcgccagccaccagggcgtggcatactataactacgccatggacgtgtggggaagagggacgctcgtcaccgtgtcctccgggggcggtggatcgggtggaggaggaagcggtggcgggggcagcgaaatcgtgctgactcagagcccgggaactctttcactgtccccgggagaacgggccactctctcgtgccgggccacccagtccatcggctcctccttccttgcctggtaccagcagaggccaggacaggcgccccgcctgctgatctacggtgcttcccaacgcgccactggcattcctgaccggttcagcggcagagggtcgggaaccgatttcacactgaccatttcccgggtggagcccgaagattcggcagtctactactgtcagcattacgagtcctccccttcatggaccttcggtcaagggaccaaagtggagatcaag

SEQ ID NO: 496 - protein, 122 aa, Artificial Sequence
  source: /note="Description of Artificial Sequence: Synthetic polypeptide"
EVQLVESGGGLVQPGRSLRLSCTASGFTFDDYAMHWVRQRPGKGLEWVASINWKGNSLAYGDSVKGRFAISRDNAKNTVFLQMNSLRTEDTAVYYCASHQGVAYYNYAMDVWGRGTLVTVSS

SEQ ID NO: 497 - protein, 109 aa, Artificial Sequence
  source: /note="Description of Artificial Sequence: Synthetic polypeptide"
EIVLTQSPGTLSLSPGERATLSCRATQSIGSSFLAWYQQRPGQAPRLLIYGASQRATGIPDRFSGRGSGTDFTLTISRVEPEDSAVYYCQHYESSPSWTFGQGTKVEIK

SEQ ID NO: 498 - protein, 241 aa, Artificial Sequence
  source: /note="Description of Artificial Sequence: Synthetic polypeptide"
EVQLVESGGGLVQPGGSLRLSCAASGFTFSSYAMSWVRQAPGKGLEWVSAISGSGGSTYYADSVKGRFTISRDNSKNTLYLQMNSLRAEDTAVYYCAKVVRDGMDVWGQGTTVTVSSGGGGSGGGGSGGGGSEIVLTQSPATLSLSPGERATLSCRASQSVSSSYLAWYQQKPGQAPRLLIYGASSRATGIPDRFSGNGSGTDFTLTISRLEPEDFAVYYCQQYGSPPRFTFGPGTKVDIK

SEQ ID NO: 499 - DNA, 723 bp, Artificial Sequence
  source: /note="Description of Artificial Sequence: Synthetic polynucleotide"
gaggtgcagttggtcgaaagcgggggcgggcttgtgcagcctggcggatcactgcggctgtcctgcgcggcatcaggcttcacgttttcttcctacgccatgtcctgggtgcgccaggcccctggaaagggactggaatgggtgtccgcgatttcggggtccggcgggagcacctactacgccgattccgtgaagggccgcttcactatctcgcgggacaactccaagaacaccctctacctccaaatgaatagcctgcgggccgaggataccgccgtctactattgcgctaaggtcgtgcgcgacggaatggacgtgtggggacagggtaccaccgtgacagtgtcctcggggggaggcggtagcggcggaggaggaagcggtggtggaggttccgagattgtgctgactcaatcacccgcgaccctgagcctgtcccccggcgaaagggccactctgtcctgtcgggccagccaatcagtctcctcctcgtacctggcctggtaccagcagaagccaggacaggctccgagactccttatctatggcgcatcctcccgcgccaccggaatcccggataggttctcgggaaacggatcggggaccgacttcactctcaccatctcccggctggaaccggaggacttcgccgtgtactactgccagcagtacggcagcccgcctagattcactttcggccccggcaccaaagtggacatcaag

SEQ ID NO: 500 - protein, 117 aa, Artificial Sequence
  source: /note="Description of Artificial Sequence: Synthetic polypeptide"
EVQLVESGGGLVQPGGSLRLSCAASGFTFSSYAMSWVRQAPGKGLEWVSAISGSGGSTYYADSVKGRFTISRDNSKNTLYLQMNSLRAEDTAVYYCAKVVRDGMDVWGQGTTVTVSS

SEQ ID NO: 501 - protein, 109 aa, Artificial Sequence
  source: /note="Description of Artificial Sequence: Synthetic polypeptide"
EIVLTQSPATLSLSPGERATLSCRASQSVSSSYLAWYQQKPGQAPRLLIYGASSRATGIPDRFSGNGSGTDFTLTISRLEPEDFAVYYCQQYGSPPRFTFGPGTKVDIK

SEQ ID NO: 502 - protein, 242 aa, Artificial Sequence
  source: /note="Description of Artificial Sequence: Synthetic polypeptide"
EVQLLESGGGLVQPGGSLRLSCAASGFTFSSYAMSWVRQAPGKGLEWVSAISGSGGSTYYADSVKGRFTISRDNSKNTLYLQMNSLRAEDTAVYYCAKIPQTGTFDYWGQGTLVTVSSGGGGSGGGGSGGGGSEIVLTQSPGTLSLSPGERATLSCRASQSVSSSYLAWYQQRPGQAPRLLIYGASSRATGIPDRFSGSGSGTDFTLTISRLEPEDFAVYYCQHYGSSPSWTFGQGTRLEIK

SEQ ID NO: 503 - DNA, 726 bp, Artificial Sequence
  source: /note="Description of Artificial Sequence: Synthetic polynucleotide"
gaagtgcagctgctggagtccggcggtggattggtgcaaccggggggatcgctcagactgtcctgtgcggcgtcaggcttcaccttctcgagctacgccatgtcatgggtcagacaggcccctggaaagggtctggaatgggtgtccgccatttccgggagcgggggatctacatactacgccgatagcgtgaagggccgcttcaccatttcccgggacaactccaagaacactctctatctgcaaatgaactccctccgcgctgaggacactgccgtgtactactgcgccaaaatccctcagaccggcaccttcgactactggggacaggggactctggtcaccgtcagcagcggtggcggaggttcggggggaggaggaagcggcggcggagggtccgagattgtgctgacccagtcacccggcactttgtccctgtcgcctggagaaagggccaccctttcctgccgggcatcccaatccgtgtcctcctcgtacctggcctggtaccagcagaggcccggacaggccccacggcttctgatctacggagcaagcagccgcgcgaccggtatcccggaccggttttcgggctcgggctcaggaactgacttcaccctcaccatctcccgcctggaacccgaagatttcgctgtgtattactgccagcactacggcagctccccgtcctggacgttcggccagggaactcggctggagatcaag

SEQ ID NO: 504 - protein, 118 aa, Artificial Sequence
  source: /note="Description of Artificial Sequence: Synthetic polypeptide"
EVQLLESGGGLVQPGGSLRLSCAASGFTFSSYAMSWVRQAPGKGLEWVSAISGSGGSTYYADSVKGRFTISRDNSKNTLYLQMNSLRAEDTAVYYCAKIPQTGTFDYWGQGTLVTVSS

SEQ ID NO: 505 - protein, 109 aa, Artificial Sequence
  source: /note="Description of Artificial Sequence: Synthetic polypeptide"
EIVLTQSPGTLSLSPGERATLSCRASQSVSSSYLAWYQQRPGQAPRLLIYGASSRATGIPDRFSGSGSGTDFTLTISRLEPEDFAVYYCQHYGSSPSWTFGQGTRLEIK

SEQ ID NO: 506 - protein, 248 aa, Artificial Sequence
  source: /note="Description of Artificial Sequence: Synthetic polypeptide"
EVQLVETGGGLVQPGGSLRLSCAASGFTFSSYAMSWVRQAPGKGLEWVSAISGSGGSTYYADSVKGRFTMSRENDKNSVFLQMNSLRVEDTGVYYCARANYKRELRYYYGMDVWGQGTMVTVSSGGGGSGGGGSGGGGSEIVMTQSPGTLSLSPGESATLSCRASQRVASNYLAWYQHKPGQAPSLLISGASSRATGVPDRFSGSGSGTDFTLAISRLEPEDSAVYYCQHYDSSPSWTFGQGTKVEIK

SEQ ID NO: 507 - DNA, 744 bp, Artificial Sequence
  source: /note="Description of Artificial Sequence: Synthetic polynucleotide"
gaagtgcaactggtggaaaccggtggaggactcgtgcagcctggcggcagcctccggctgagctgcgccgcttcgggattcaccttttcctcctacgcgatgtcttgggtcagacaggcccccggaaaggggctggaatgggtgtcagccatctccggctccggcggatcaacgtactacgccgactccgtgaaaggccggttcaccatgtcgcgcgagaatgacaagaactccgtgttcctgcaaatgaactccctgagggtggaggacaccggagtgtactattgtgcgcgcgccaactacaagagagagctgcggtactactacggaatggacgtctggggacagggaactatggtgaccgtgtcatccggtggagggggaagcggcggtggaggcagcgggggcgggggttcagaaattgtcatgacccagtccccgggaactctttccctctcccccggggaatccgcgactttgtcctgccgggccagccagcgcgtggcctcgaactacctcgcatggtaccagcataagccaggccaagccccttccctgctgatttccggggctagcagccgcgccactggcgtgccggataggttctcgggaagcggctcgggtaccgatttcaccctggcaatctcgcggctggaaccggaggattcggccgtgtactactgccagcactatgactcatccccctcctggacattcggacagggcaccaaggtcgagatcaag

SEQ ID NO: 508 - protein, 124 aa, Artificial Sequence
  source: /note="Description of Artificial Sequence: Synthetic polypeptide"
EVQLVETGGGLVQPGGSLRLSCAASGFTFSSYAMSWVRQAPGKGLEWVSAISGSGGSTYYADSVKGRFTMSRENDKNSVFLQMNSLRVEDTGVYYCARANYKRELRYYYGMDVWGQGTMVTVSS

SEQ ID NO: 509 - protein, 109 aa, Artificial Sequence
  source: /note="Description of Artificial Sequence: Synthetic polypeptide"
EIVMTQSPGTLSLSPGESATLSCRASQRVASNYLAWYQHKPGQAPSLLISGASSRATGVPDRFSGSGSGTDFTLAISRLEPEDSAVYYCQHYDSSPSWTFGQGTKVEIK

SEQ ID NO: 510 - protein, 244 aa, Artificial Sequence
  source: /note="Description of Artificial Sequence: Synthetic polypeptide"
EVQLLETGGGLVQPGGSLRLSCAASGFSFSSYAMSWVRQAPGKGLEWVSAISGSGGSTYYADSVKGRFTISRDNSKNTLYLQMNSLRAEDTAVYYCAKALVGATGAFDIWGQGTLVTVSSGGGGSGGGGSGGGGSEIVLTQSPGTLSLSPGERATLSCRASQSLSSNFLAWYQQKPGQAPGLLIYGASNWATGTPDRFSGSGSGTDFTLTITRLEPEDFAVYYCQYYGTSPMYTFGQGTKVEIK

SEQ ID NO: 511 - DNA, 732 bp, Artificial Sequence
  source: /note="Description of Artificial Sequence: Synthetic polynucleotide"
gaagtgcagctgctcgaaaccggtggagggctggtgcagccagggggctccctgaggctttcatgcgccgctagcggattctccttctcctcttacgccatgtcgtgggtccgccaagcccctggaaaaggcctggaatgggtgtccgcgatttccgggagcggaggttcgacctattacgccgactccgtgaagggccgctttaccatctcccgggataactccaagaacactctgtacctccaaatgaactcgctgagagccgaggacaccgccgtgtattactgcgcgaaggcgctggtcggcgcgactggggcattcgacatctggggacagggaactcttgtgaccgtgtcgagcggaggcggcggctccggcggaggagggagcgggggcggtggttccgaaatcgtgttgactcagtccccgggaaccctgagcttgtcacccggggagcgggccactctctcctgtcgcgcctcccaatcgctctcatccaatttcctggcctggtaccagcagaagcccggacaggccccgggcctgctcatctacggcgcttcaaactgggcaacgggaacccctgatcggttcagcggaagcggatcgggtactgactttaccctgaccatcaccagactggaaccggaggacttcgccgtgtactactgccagtactacggcacctcccccatgtacacattcggacagggtaccaaggtcgagattaag

SEQ ID NO: 512 - protein, 120 aa, Artificial Sequence
  source: /note="Description of Artificial Sequence: Synthetic polypeptide"
EVQLLETGGGLVQPGGSLRLSCAASGFSFSSYAMSWVRQAPGKGLEWVSAISGSGGSTYYADSVKGRFTISRDNSKNTLYLQMNSLRAEDTAVYYCAKALVGATGAFDIWGQGTLVTVSS

SEQ ID NO: 513 - protein, 109 aa, Artificial Sequence
  source: /note="Description of Artificial Sequence: Synthetic polypeptide"
EIVLTQSPGTLSLSPGERATLSCRASQSLSSNFLAWYQQKPGQAPGLLIYGASNWATGTPDRFSGSGSGTDFTLTITRLEPEDFAVYYCQYYGTSPMYTFGQGTKVEIK

SEQ ID NO: 514 - protein, 244 aa, Artificial Sequence
  source: /note="Description of Artificial Sequence: Synthetic polypeptide"
EVQLLESGGGLVQPGGSLRLSCAASGFTFSSYAMSWVRQAPGKGLEWVSAISGSGGSTYYADSVKGRFTISRDNSKNTLYLQMNSLRAEDTAVYYCVLWFGEGFDPWGQGTLVTVSSGGGGSGGGGSGGGGSDIVLTQSPLSLPVTPGEPASISCRSSQSLLHSNGYNYLDWYLQKPGQSPQLLIYLGSNRASGVPDRFSGSGSGTDFTLKISRVEAEDVGVYYCMQALQTPLTFGGGTKVDIK

SEQ ID NO: 515 - DNA, 733 bp, Artificial Sequence
  source: /note="Description of Artificial Sequence: Synthetic polynucleotide"
gaagtgcagctgcttgagagcggtggaggtctggtgcagcccgggggatcactgcgcctgtcctgtgccgcgtccggtttcactttctcctcgtacgccatgtcgtgggtcagacaggcaccgggaaagggactggaatgggtgtcagccatttcgggttcggggggcagcacctactacgctgactccgtgaagggccggttcaccatttcccgcgacaactccaagaacaccttgtacctccaaatgaactccctgcgggccgaagataccgccgtgtattactgcgtgctgtggttcggagagggattcgacccgtggggacaaggaacactcgtgactgtgtcatccggcggaggcggcagcggtggcggcggttccggcggcggcggatctgacatcgtgttgacccagtcccctctgagcctgccggtcactcctggcgaaccagccagcatctcctgccggtcgagccagtccctcctgcactccaatgggtacaactacctcgattggtatctgcaaaagccgggccagagcccccagctgctgatctaccttgggtcaaaccgcgcttccggggtgcctgatagattctccgggtccgggagcggaaccgactttaccctgaaaatctcgagggtggaggccgaggacgtcggagtgtactactgcatgcaggcgctccagactcccctgaccttcggaggaggaacgaaggtcgacatcaaga

SEQ ID NO: 516 - protein, 117 aa, Artificial Sequence
  source: /note="Description of Artificial Sequence: Synthetic polypeptide"
EVQLLESGGGLVQPGGSLRLSCAASGFTFSSYAMSWVRQAPGKGLEWVSAISGSGGSTYYADSVKGRFTISRDNSKNTLYLQMNSLRAEDTAVYYCVLWFGEGFDPWGQGTLVTVSS

SEQ ID NO: 517 - protein, 112 aa, Artificial Sequence
  source: /note="Description of Artificial Sequence: Synthetic polypeptide"
DIVLTQSPLSLPVTPGEPASISCRSSQSLLHSNGYNYLDWYLQKPGQSPQLLIYLGSNRASGVPDRFSGSGSGTDFTLKISRVEAEDVGVYYCMQALQTPLTFGGGTKVDIK

SEQ ID NO: 518 - protein, 251 aa, Artificial Sequence
  source: /note="Description of Artificial Sequence: Synthetic polypeptide"
QVQLVESGGGLVQPGGSLRLSCAASGFTFSSYAMSWVRQAPGKGLEWVSAISGSGGSTYYADSVKGRFTISRDNSKNTLYLQMNSLRAEDTAVYYCAKVGYDSSGYYRDYYGMDVWGQGTTVTVSSGGGGSGGGGSGGGGSEIVLTQSPGTLSLSPGERATLSCRASQSVSSSYLAWYQQKPGQAPRLLIYGTSSRATGISDRFSGSGSGTDFTLTISRLEPEDFAVYYCQHYGNSPPKFTFGPGTKLEIK

SEQ ID NO: 519 - DNA, 753 bp, Artificial Sequence
  source: /note="Description of Artificial Sequence: Synthetic polynucleotide"
caagtgcagctcgtggagtcaggcggaggactggtgcagcccgggggctccctgagactttcctgcgcggcatcgggttttaccttctcctcctatgctatgtcctgggtgcgccaggccccgggaaagggactggaatgggtgtccgcaatcagcggtagcgggggctcaacatactacgccgactccgtcaagggtcgcttcactatttcccgggacaactccaagaataccctgtacctccaaatgaacagcctcagggccgaggatactgccgtgtactactgcgccaaagtcggatacgatagctccggttactaccgggactactacggaatggacgtgtggggacagggcaccaccgtgaccgtgtcaagcggcggaggcggttcaggagggggaggctccggcggtggagggtccgaaatcgtcctgactcagtcgcctggcactctgtcgttgtccccgggggagcgcgctaccctgtcgtgtcgggcgtcgcagtccgtgtcgagctcctacctcgcgtggtaccagcagaagcccggacaggcccctagacttctgatctacggcacttcttcacgcgccaccgggatcagcgacaggttcagcggctccggctccgggaccgacttcaccctgaccattagccggctggagcctgaagatttcgccgtgtattactgccaacactacggaaactcgccgccaaagttcacgttcggacccggaaccaagctggaaatcaag

SEQ ID NO: 520 - protein, 126 aa, Artificial Sequence
  source: /note="Description of Artificial Sequence: Synthetic polypeptide"
QVQLVESGGGLVQPGGSLRLSCAASGFTFSSYAMSWVRQAPGKGLEWVSAISGSGGSTYYADSVKGRFTISRDNSKNTLYLQMNSLRAEDTAVYYCAKVGYDSSGYYRDYYGMDVWGQGTTVTVSS

SEQ ID NO: 521 - protein, 110 aa, Artificial Sequence
  source: /note="Description of Artificial Sequence: Synthetic polypeptide"
EIVLTQSPGTLSLSPGERATLSCRASQSVSSSYLAWYQQKPGQAPRLLIYGTSSRATGISDRFSGSGSGTDFTLTISRLEPEDFAVYYCQHYGNSPPKFTFGPGTKLEIK

SEQ ID NO: 522 - protein, 246 aa, Artificial Sequence
  source: /note="Description of Artificial Sequence: Synthetic polypeptide"
EVQLVESGGGLVQPGGSLRLSCAASGFTFSSYAMSWVRQAPGKGLEWVSAISGSGGSTYYADSVKGRFTISRDNSKNTLYLQMNSLRAEDTAVYYCAKMGWSSGYLGAFDIWGQGTTVTVSSGGGGSGGGGSGGGGSEIVLTQSPGTLSLSPGERATLSCRASQSVASSFLAWYQQKPGQAPRLLIYGASGRATGIPDRFSGSGSGTDFTLTISRLEPEDFAVYYCQHYGGSPRLTFGGGTKVDIK

SEQ ID NO: 523 - DNA, 739 bp, Artificial Sequence
  source: /note="Description of Artificial Sequence: Synthetic polynucleotide"
gaagtccaactggtggagtccgggggagggctcgtgcagcccggaggcagccttcggctgtcgtgcgccgcctccgggttcacgttctcatcctacgcgatgtcgtgggtcagacaggcaccaggaaagggactggaatgggtgtccgccattagcggctccggcggtagcacctactatgccgactcagtgaagggaaggttcactatctcccgcgacaacagcaagaacaccctgtacctccaaatgaactctctgcgggccgaggataccgcggtgtactattgcgccaagatgggttggtccagcggatacttgggagccttcgacatttggggacagggcactactgtgaccgtgtcctccgggggtggcggatcgggaggcggcggctcgggtggagggggttccgaaatcgtgttgacccagtcaccgggaaccctctcgctgtccccgggagaacgggctacactgtcatgtagagcgtcccagtccgtggcttcctcgttcctggcctggtaccagcagaagccgggacaggcaccccgcctgctcatctacggagccagcggccgggcgaccggcatccctgaccgcttctccggttccggctcgggcaccgactttactctgaccattagcaggcttgagcccgaggattttgccgtgtactactgccaacactacggggggagccctcgcctgaccttcggaggcggaactaaggtcgatatcaaaa

SEQ ID NO: 524 - protein, 122 aa, Artificial Sequence
  source: /note="Description of Artificial Sequence: Synthetic polypeptide"
EVQLVESGGGLVQPGGSLRLSCAASGFTFSSYAMSWVRQAPGKGLEWVSAISGSGGSTYYADSVKGRFTISRDNSKNTLYLQMNSLRAEDTAVYYCAKMGWSSGYLGAFDIWGQGTTVTVSS

SEQ ID NO: 525 - protein, 109 aa, Artificial Sequence
  source: /note="Description of Artificial Sequence: Synthetic polypeptide"
EIVLTQSPGTLSLSPGERATLSCRASQSVASSFLAWYQQKPGQAPRLLIYGASGRATGIPDRFSGSGSGTDFTLTISRLEPEDFAVYYCQHYGGSPRLTFGGGTKVDIK

SEQ ID NO: 526 - protein, 122 aa, Artificial Sequence
  source: /note="Description of Artificial Sequence: Synthetic polypeptide"
QIQLVQSGPDLKKPGETVKLSCKASGYTFTNFGMNWVKQAPGKGFKWMAWINTYTGESYFADDFKGRFAFSVETSATTAYLQINNLKTEDTATYFCARGEIYYGYDGGFAYWGQGTLVTVSA

SEQ ID NO: 527 - protein, 107 aa, Artificial Sequence
  source: /note="Description of Artificial Sequence: Synthetic polypeptide"
DVVMTQSHRFMSTSVGDRVSITCRASQDVNTAVSWYQQKPGQSPKLLIFSASYRYTGVPDRFTGSGSGADFTLTISSVQAEDLAVYYCQQHYSTPWTFGGGTKLDIK

SEQ ID NO: 528 - protein, 244 aa, Artificial Sequence
  source: /note="Description of Artificial Sequence: Synthetic polypeptide"
QIQLVQSGPDLKKPGETVKLSCKASGYTFTNFGMNWVKQAPGKGFKWMAWINTYTGESYFADDFKGRFAFSVETSATTAYLQINNLKTEDTATYFCARGEIYYGYDGGFAYWGQGTLVTVSAGGGGSGGGGSGGGGSDVVMTQSHRFMSTSVGDRVSITCRASQDVNTAVSWYQQKPGQSPKLLIFSASYRYTGVPDRFTGSGSGADFTLTISSVQAEDLAVYYCQQHYSTPWTFGGGTKLDIK

SEQ ID NO: 529 - protein, 117 aa, Artificial Sequence
  source: /note="Description of Artificial Sequence: Synthetic polypeptide"
QIQLVQSGPELKKPGETVKISCKASGYTFTDYSINWVKRAPGKGLKWMGWINTETREPAYAYDFRGRFAFSLETSASTAYLQINNLKYEDTATYFCALDYSYAMDYWGQGTSVTVSS

SEQ ID NO: 530 - protein, 111 aa, Artificial Sequence
  source: /note="Description of Artificial Sequence: Synthetic polypeptide"
DIVLTQSPASLAMSLGKRATISCRASESVSVIGAHLIHWYQQKPGQPPKLLIYLASNLETGVPARFSGSGSGTDFTLTIDPVEEDDVAIYSCLQSRIFPRTFGGGTKLEIK

SEQ ID NO: 531 - protein, 249 aa, Artificial Sequence
  source: /note="Description of Artificial Sequence: Synthetic polypeptide"
QIQLVQSGPELKKPGETVKISCKASGYTFTDYSINWVKRAPGKGLKWMGWINTETREPAYAYDFRGRFAFSLETSASTAYLQINNLKYEDTATYFCALDYSYAMDYWGQGTSVTVSSGGGGSGGGGSGGGGSQIQLVQSGPELKKPGETVKISCKASGYTFTDYSINWVKRAPGKGLKWMGWINTETREPAYAYDFRGRFAFSLETSASTAYLQINNLKYEDTATYFCALDYSYAMDYWGQGTSVTVSS

SEQ ID NO: 532 - protein, 117 aa, Artificial Sequence
  source: /note="Description of Artificial Sequence: Synthetic polypeptide"
QIQLVQSGPELKKPGETVKISCKASGYTFRHYSMNWVKQAPGKGLKWMGRINTESGVPIYADDFKGRFAFSVETSASTAYLVINNLKDEDTASYFCSNDYLYSLDFWGQGTALTVSS

SEQ ID NO: 533 - protein, 111 aa, Artificial Sequence
  source: /note="Description of Artificial Sequence: Synthetic polypeptide"
DIVLTQSPPSLAMSLGKRATISCRASESVTILGSHLIYWYQQKPGQPPTLLIQLASNVQTGVPARFSGSGSRTDFTLTIDPVEEDDVAVYYCLQSRTIPRTFGGGTKLEIK

SEQ ID NO: 534 - protein, 243 aa, Artificial Sequence
  source: /note="Description of Artificial Sequence: Synthetic polypeptide"
QIQLVQSGPELKKPGETVKISCKASGYTFRHYSMNWVKQAPGKGLKWMGRINTESGVPIYADDFKGRFAFSVETSASTAYLVINNLKDEDTASYFCSNDYLYSLDFWGQGTALTVSSGGGGSGGGGSGGGGSDIVLTQSPPSLAMSLGKRATISCRASESVTILGSHLIYWYQQKPGQPPTLLIQLASNVQTGVPARFSGSGSRTDFTLTIDPVEEDDVAVYYCLQSRTIPRTFGGGTKLEIK

SEQ ID NO: 535 - protein, 117 aa, Artificial Sequence
  source: /note="Description of Artificial Sequence: Synthetic polypeptide"
QIQLVQSGPELKKPGETVKISCKASGYTFTHYSMNWVKQAPGKGLKWMGRINTETGEPLYADDFKGRFAFSLETSASTAYLVINNLKNEDTATFFCSNDYLYSCDYWGQGTTLTVSS

SEQ ID NO: 536 - protein, 111 aa, Artificial Sequence; identical to SEQ ID NO: 533
  source: /note="Description of Artificial Sequence: Synthetic polypeptide"

SEQ ID NO: 537 - protein, 243 aa, Artificial Sequence
  source: /note="Description of Artificial Sequence: Synthetic polypeptide"
QIQLVQSGPELKKPGETVKISCKASGYTFTHYSMNWVKQAPGKGLKWMGRINTETGEPLYADDFKGRFAFSLETSASTAYLVINNLKNEDTATFFCSNDYLYSCDYWGQGTTLTVSSGGGGSGGGGSGGGGSDIVLTQSPPSLAMSLGKRATISCRASESVTILGSHLIYWYQQKPGQPPTLLIQLASNVQTGVPARFSGSGSRTDFTLTIDPVEEDDVAVYYCLQSRTIPRTFGGGTKLEIK

SEQ ID NO: 538 - protein, 5 aa, Artificial Sequence
  source: /note="Description of Artificial Sequence: Synthetic peptide"
NHGMS

SEQ ID NO: 539 - protein, 16 aa, Artificial Sequence
  source: /note="Description of Artificial Sequence: Synthetic peptide"
GIVYSGSTYYAASVKG

SEQ ID NO: 540 - protein, 7 aa, Artificial Sequence
  source: /note="Description of Artificial Sequence: Synthetic peptide"
HGGESDV

SEQ ID NO: 541 - protein, 5 aa, Artificial Sequence
  source: /note="Description of Artificial Sequence: Synthetic peptide"
NYAMS

SEQ ID NO: 542 - protein, 17 aa, Artificial Sequence
  source: /note="Description of Artificial Sequence: Synthetic peptide"
GISRSGENTYYADSVKG

SEQ ID NO: 543 - protein, 11 aa, Artificial Sequence
  source: /note="Description of Artificial Sequence: Synthetic peptide"
SPAHYYGGMDV

SEQ ID NO: 544 - protein, 5 aa, Artificial Sequence
  source: /note="Description of Artificial Sequence: Synthetic peptide"
DYAMH

SEQ ID NO: 545 - protein, 17 aa, Artificial Sequence
  source: /note="Description of Artificial Sequence: Synthetic peptide"
GISWNSGSIGYADSVKG

SEQ ID NO: 546 - protein, 6 aa, Artificial Sequence
  source: /note="Description of Artificial Sequence: Synthetic peptide"
HSFLAY

SEQ ID NO: 547 - protein, 5 aa, Artificial Sequence
  source: /note="Description of Artificial Sequence: Synthetic peptide"
NFGIN

SEQ ID NO: 548 - protein, 17 aa, Artificial Sequence
  source: /note="Description of Artificial Sequence: Synthetic peptide"
WINPKNNNTNYAQKFQG

SEQ ID NO: 549 - protein, 11 aa, Artificial Sequence
  source: /note="Description of Artificial Sequence: Synthetic peptide"
GPYYYQSYMDV

SEQ ID NO: 550 - protein, 5 aa, Artificial Sequence
  source: /note="Description of Artificial Sequence: Synthetic peptide"
SDAMT

SEQ ID NO: 551 - protein, 17 aa, Artificial Sequence
  source: /note="Description of Artificial Sequence: Synthetic peptide"
VISGSGGTTYYADSVKG

SEQ ID NO: 552 - protein, 14 aa, Artificial Sequence
  source: /note="Description of Artificial Sequence: Synthetic peptide"
LDSSGYYYARGPRY

SEQ ID NO: 553 - protein, 5 aa, Artificial Sequence
  source: /note="Description of Artificial Sequence: Synthetic peptide"
NYGIT

SEQ ID NO: 554 - protein, 17 aa, Artificial Sequence
  source: /note="Description of Artificial Sequence: Synthetic peptide"
WISAYNGNTNYAQKFQG

SEQ ID NO: 555 - protein, 9 aa, Artificial Sequence
  source: /note="Description of Artificial Sequence: Synthetic peptide"
GPYYYYMDV

SEQ ID NO: 556 - protein, 5 aa, Artificial Sequence
  source: /note="Description of Artificial Sequence: Synthetic peptide"
DYYMS

SEQ ID NO: 557 - protein, 17 aa, Artificial Sequence
  source: /note="Description of Artificial Sequence: Synthetic peptide"
YISSSGSTIYYADSVKG

SEQ ID NO: 558 - protein, 8 aa, Artificial Sequence
  source: /note="Description of Artificial Sequence: Synthetic peptide"
ESGDGMDV

SEQ ID NO: 559 - protein, 17 aa, Artificial Sequence
  source: /note="Description of Artificial Sequence: Synthetic peptide"
YISSSGNTIYYADSVKG

SEQ ID NO: 560 - protein, 8 aa, Artificial Sequence
  source: /note="Description of Artificial Sequence: Synthetic peptide"
STMVREDY

SEQ ID NO: 561 - protein, 7 aa, Artificial Sequence
  source: /note="Description of Artificial Sequence: Synthetic peptide"
SSYYYWG

SEQ ID NO: 562 - protein, 16 aa, Artificial Sequence
  source: /note="Description of Artificial Sequence: Synthetic peptide"
SIYYSGSAYYNPSLKS

SEQ ID NO: 563 - protein, 11 aa, Artificial Sequence
  source: /note="Description of Artificial Sequence: Synthetic peptide"
HWQEWPDAFDI

SEQ ID NO: 564 - protein, 7 aa, Artificial Sequence
  source: /note="Description of Artificial Sequence: Synthetic peptide"
TSGMCVS

SEQ ID NO: 565 - protein, 16 aa, Artificial Sequence
  source: /note="Description of Artificial Sequence: Synthetic peptide"
RIDWDEDKFYSTSLKT

SEQ ID NO: 566 - protein, 13 aa, Artificial Sequence
  source: /note="Description of Artificial Sequence: Synthetic peptide"
SGAGGTSATAFDI

SEQ ID NO: 567 - protein, 5 aa, Artificial Sequence
  source: /note="Description of Artificial Sequence: Synthetic peptide"
SYSMN

SEQ ID NO: 568 - protein, 17 aa, Artificial Sequence
  source: /note="Description of Artificial Sequence: Synthetic peptide"
SISSSSSYIYYADSVKG

SEQ ID NO: 569 - protein, 10 aa, Artificial Sequence
  source: /note="Description of Artificial Sequence: Synthetic peptide"
TIAAVYAFDI

SEQ ID NO: 570 - protein, 8 aa, Artificial Sequence
  source: /note="Description of Artificial Sequence: Synthetic peptide"
DLRGAFDI

SEQ ID NO: 571 - protein, 5 aa, Artificial Sequence
  source: /note="Description of Artificial Sequence: Synthetic peptide"
SHYIH

SEQ ID NO: 572 - protein, 17 aa, Artificial Sequence
  source: /note="Description of Artificial Sequence: Synthetic peptide"
MINPSGGVTAYSQTLQG

SEQ ID NO: 573 - protein, 11 aa, Artificial Sequence
  source: /note="Description of Artificial Sequence: Synthetic peptide"
EGSGSGWYFDF

SEQ ID NO: 574 - protein, 7 aa, Artificial Sequence
  source: /note="Description of Artificial Sequence: Synthetic peptide"
SGGYYWS

SEQ ID NO: 575 - protein, 16 aa, Artificial Sequence
  source: /note="Description of Artificial Sequence: Synthetic peptide"
YIYYSGSTYYNPSLKS

SEQ ID NO: 576 - protein, 13 aa, Artificial Sequence
  source: /note="Description of Artificial Sequence: Synthetic peptide"
AGIAARLRGAFDI

SEQ ID NO: 577 - protein, 5 aa, Artificial Sequence
  source: /note="Description of Artificial Sequence: Synthetic peptide"
SYAIS

SEQ ID NO: 578 - protein, 17 aa, Artificial Sequence
  source: /note="Description of Artificial Sequence: Synthetic peptide"
GIIPIFGTANYAQKFQG

SEQ ID NO: 579 - protein, 20 aa, Artificial Sequence
  source: /note="Description of Artificial Sequence: Synthetic peptide"
RGGYQLLRWDVGLLRSAFDI

SEQ ID NO: 580 - protein, 7 aa, Artificial Sequence
  source: /note="Description of Artificial Sequence: Synthetic peptide"
SNSAAWN

SEQ ID NO: 581 - protein, 18 aa, Artificial Sequence
  source: /note="Description of Artificial Sequence: Synthetic peptide"
RTYYRSKWYSFYAISLKS

SEQ ID NO: 582 - protein, 13 aa, Artificial Sequence
  source: /note="Description of Artificial Sequence: Synthetic peptide"
SSPEGLFLYWFDP

SEQ ID NO: 583 - protein, 5 aa, Artificial Sequence
  source: /note="Description of Artificial Sequence: Synthetic peptide"
SYAMS

SEQ ID NO: 584 - protein, 17 aa, Artificial Sequence
  source: /note="Description of Artificial Sequence: Synthetic peptide"
AISGSGGSTYYADSVKG

SEQ ID NO: 585 - protein, 9 aa, Artificial Sequence
  source: /note="Description of Artificial Sequence: Synthetic peptide"
VEGSGSLDY

SEQ ID NO: 586 - protein, 5 aa, Artificial Sequence
  source: /note="Description of Artificial Sequence: Synthetic peptide"
RYPMS

SEQ ID NO: 587 - protein, 17 aa, Artificial Sequence
  source: /note="Description of Artificial Sequence: Synthetic peptide"
GISDSGVSTYYADSAKG

SEQ ID NO: 588 - protein, 9 aa, Artificial Sequence
  source: /note="Description of Artificial Sequence: Synthetic peptide"
RAGSEASDI

SEQ ID NO: 589 - protein, 15 aa, Artificial Sequence
  source: /note="Description of Artificial Sequence: Synthetic peptide"
ATYKRELRYYYGMDV

SEQ ID NO: 590 - protein, 8 aa, Artificial Sequence
  source: /note="Description of Artificial Sequence: Synthetic peptide"
VGKAVPDV

SEQ ID NO: 591 - protein, 17 aa, Artificial Sequence
  source: /note="Description of Artificial Sequence: Synthetic peptide"
SINWKGNSLAYGDSVKG

SEQ ID NO: 592 - protein, 13 aa, Artificial Sequence
  source: /note="Description of Artificial Sequence: Synthetic peptide"
HQGVAYYNYAMDV

SEQ ID NO: 593 - protein, 8 aa, Artificial Sequence
  source: /note="Description of Artificial Sequence: Synthetic peptide"
VVRDGMDV

SEQ ID NO: 594 - protein, 9 aa, Artificial Sequence
  source: /note="Description of Artificial Sequence: Synthetic peptide"
IPQTGTFDY

SEQ ID NO: 595 - protein, 15 aa, Artificial Sequence
  source: /note="Description of Artificial Sequence: Synthetic peptide"
ANYKRELRYYYGMDV

SEQ ID NO: 596 - protein, 11 aa, Artificial Sequence
  source: /note="Description of Artificial Sequence: Synthetic peptide"
ALVGATGAFDI

SEQ ID NO: 597 - protein, 8 aa, Artificial Sequence
  source: /note="Description of Artificial Sequence: Synthetic peptide"
WFGEGFDP

SEQ ID NO: 598 - protein, 17 aa, Artificial Sequence
  source: /note="Description of Artificial Sequence: Synthetic peptide"
VGYDSSGYYRDYYGMDV

SEQ ID NO: 599 - protein, 13 aa, Artificial Sequence
  source: /note="Description of Artificial Sequence: Synthetic peptide"
MGWSSGYLGAFDI

SEQ ID NO: 600 - protein, 5 aa, Artificial Sequence
  source: /note="Description of Artificial Sequence: Synthetic peptide"
NFGMN

SEQ ID NO: 601 - protein, 17 aa, Artificial Sequence
  source: /note="Description of Artificial Sequence: Synthetic peptide"
WINTYTGESYFADDFKG

SEQ ID NO: 602 - protein, 13 aa, Artificial Sequence
  source: /note="Description of Artificial Sequence: Synthetic peptide"
GEIYYGYDGGFAY

SEQ ID NO: 603 - protein, 5 aa, Artificial Sequence
  source: /note="Description of Artificial Sequence: Synthetic peptide"
DYSIN

SEQ ID NO: 604 - protein, 17 aa, Artificial Sequence
  source: /note="Description of Artificial Sequence: Synthetic peptide"
WINTETREPAYAYDFRG

SEQ ID NO: 605 - protein, 8 aa, Artificial Sequence
  source: /note="Description of Artificial Sequence: Synthetic peptide"
DYSYAMDY

SEQ ID NO: 606 - protein, 5 aa, Artificial Sequence
  source: /note="Description of Artificial Sequence: Synthetic peptide"
HYSMN

SEQ ID NO: 607 - protein, 17 aa, Artificial Sequence
  source: /note="Description of Artificial Sequence: Synthetic peptide"
RINTESGVPIYADDFKG

SEQ ID NO: 608 - protein, 8 aa, Artificial Sequence
  source: /note="Description of Artificial Sequence: Synthetic peptide"
DYLYSLDF

SEQ ID NO: 609 - protein, 17 aa, Artificial Sequence
  source: /note="Description of Artificial Sequence: Synthetic peptide"
RINTETGEPLYADDFKG

SEQ ID NO: 610 - protein, 8 aa, Artificial Sequence
  source: /note="Description of Artificial Sequence: Synthetic peptide"
DYLYSCDY

SEQ ID NO: 611 - protein, 11 aa, Artificial Sequence
  source: /note="Description of Artificial Sequence: Synthetic peptide"
RASQSISSYLN

SEQ ID NO: 612 - protein, 7 aa, Artificial Sequence
  source: /note="Description of Artificial Sequence: Synthetic peptide"
AASSLQS

SEQ ID NO: 613 - protein, 9 aa, Artificial Sequence
  source: /note="Description of Artificial Sequence: Synthetic peptide"
QQSYSTPYT

SEQ ID NO: 614 - protein, 12 aa, Artificial Sequence
  source: /note="Description of Artificial Sequence: Synthetic peptide"
RASQSISSSFLA

SEQ ID NO: 615 - protein, 7 aa, Artificial Sequence
  source: /note="Description of Artificial Sequence: Synthetic peptide"
GASRRAT

SEQ ID NO: 616 - protein, 10 aa, Artificial Sequence
  source: /note="Description of Artificial Sequence: Synthetic peptide"
QQYHSSPSWT

SEQ ID NO: 617 - protein, 16 aa, Artificial Sequence
  source: /note="Description of Artificial Sequence: Synthetic peptide"
RSSQSLLHSNGYNYLD

SEQ ID NO: 618 - protein, 7 aa, Artificial Sequence
  source: /note="Description of Artificial Sequence: Synthetic peptide"
LGSNRAS

SEQ ID NO: 619 - protein, 9 aa, Artificial Sequence
  source: /note="Description of Artificial Sequence: Synthetic peptide"
MQALQTPYT

SEQ ID NO: 620 - protein, 16 aa, Artificial Sequence
  source: /note="Description of Artificial Sequence: Synthetic peptide"
KSSQSLLRNDGKTPLY

SEQ ID NO: 621 - protein, 7 aa, Artificial Sequence
  source: /note="Description of Artificial Sequence: Synthetic peptide"
EVSNRFS

SEQ ID NO: 622 - protein, 8 aa, Artificial Sequence
  source: /note="Description of Artificial Sequence: Synthetic peptide"
MQNIQFPS

SEQ ID NO: 623 - protein, 16 aa, Artificial Sequence
  source: /note="Description of Artificial Sequence: Synthetic peptide"
RSSQSLLHSNGYNYLN

SEQ ID NO: 624 - protein, 7 aa, Artificial Sequence
  source: /note="Description of Artificial Sequence: Synthetic peptide"
LGSKRAS

SEQ ID NO: 625 - protein, 7 aa, Artificial Sequence
  source: /note="Description of Artificial Sequence: Synthetic peptide"
GASTLAS

SEQ ID NO: 626 - protein, 8 aa, Artificial Sequence
  source: /note="Description of Artificial Sequence: Synthetic peptide"
QQSYKRAS

SEQ ID NO: 627 - protein, 16 aa, Artificial Sequence
  source: /note="Description of Artificial Sequence: Synthetic peptide"
RSSQSLLYSNGYNYVD

SEQ ID NO: 628 - protein, 9 aa, Artificial Sequence
  source: /note="Description of Artificial Sequence: Synthetic peptide"
MQGRQFPYS

SEQ ID NO: 629 - protein, 11 aa, Artificial Sequence
  source: /note="Description of Artificial Sequence: Synthetic peptide"
RASQSVSSNLA

SEQ ID NO: 630 - protein, 7 aa, Artificial Sequence
  source: /note="Description of Artificial Sequence: Synthetic peptide"
GASTRAS

SEQ ID NO: 631 - protein, 8 aa, Artificial Sequence
  source: /note="Description of Artificial Sequence: Synthetic peptide"
QQYGSSLT

SEQ ID NO: 632 - protein, 11 aa, Artificial Sequence
  source: /note="Description of Artificial Sequence: Synthetic peptide"
RASQSVSSKLA

SEQ ID NO: 633-635 - skipped (3 entries)

SEQ ID NO: 636 - protein, 7 aa, Artificial Sequence
  source: /note="Description of Artificial Sequence: Synthetic peptide"
GASIRAT

SEQ ID NO: 637 - protein, 9 aa, Artificial Sequence
  source: /note="Description of Artificial Sequence: Synthetic peptide"
QQYGSSSWT

SEQ ID NO: 638 - protein, 12 aa, Artificial Sequence
  source: /note="Description of Artificial Sequence: Synthetic peptide"
RASQSVGSTNLA

SEQ ID NO: 639 - protein, 7 aa, Artificial Sequence
  source: /note="Description of Artificial Sequence: Synthetic peptide"
DASNRAT

SEQ ID NO: 640 - protein, 10 aa, Artificial Sequence
  source: /note="Description of Artificial Sequence: Synthetic peptide"
QQYGSSPPWT

SEQ ID NO: 641 - protein, 7 aa, Artificial Sequence
  source: /note="Description of Artificial Sequence: Synthetic peptide"
QQSYTLA

SEQ ID NO: 642 - protein, 16 aa, Artificial Sequence
  source: /note="Description of Artificial Sequence: Synthetic peptide"
KSSESLVHNSGKTYLN

SEQ ID NO: 643 - protein, 7 aa, Artificial Sequence
  source: /note="Description of Artificial Sequence: Synthetic peptide"
EVSNRDS

SEQ ID NO: 644 - protein, 9 aa, Artificial Sequence
  source: /note="Description of Artificial Sequence: Synthetic peptide"
MQGTHWPGT

SEQ ID NO: 645 - protein, 11 aa, Artificial Sequence
  source: /note="Description of Artificial Sequence: Synthetic peptide"
QASEDINKFLN

SEQ ID NO: 646 - protein, 7 aa, Artificial Sequence
  source: /note="Description of Artificial Sequence: Synthetic peptide"
DASTLQT

SEQ ID NO: 647 - protein, 9 aa, Artificial Sequence
  source: /note="Description of Artificial Sequence: Synthetic peptide"
QQYESLPLT

SEQ ID NO: 648 - protein, 11 aa, Artificial Sequence
  source: /note="Description of Artificial Sequence: Synthetic peptide"
RASQSVGSNLA

SEQ ID NO: 649 - protein, 7 aa, Artificial Sequence
  source: /note="Description of Artificial Sequence: Synthetic peptide"
GASTRAT

SEQ ID NO: 650 - protein, 10 aa, Artificial Sequence
  source: /note="Description of Artificial Sequence: Synthetic peptide"
QQYNDWLPVT

SEQ ID NO: 651 - protein, 12 aa, Artificial Sequence
  source: /note="Description of Artificial Sequence: Synthetic peptide"
RASQSIGSSSLA

SEQ ID NO: 652 - protein, 7 aa, Artificial Sequence
  source: /note="Description of Artificial Sequence: Synthetic peptide"
GASSRAS

SEQ ID NO: 653 - protein, 10 aa, Artificial Sequence
  source: /note="Description of Artificial Sequence: Synthetic peptide"
QQYAGSPPFT

SEQ ID NO: 654 - protein, 11 aa, Artificial Sequence
  source: /note="Description of Artificial Sequence: Synthetic peptide"
KASQDIDDAMN

SEQ ID NO: 655 - protein, 7 aa, Artificial Sequence
  source: /note="Description of Artificial Sequence: Synthetic peptide"
SATSPVP

SEQ ID NO: 656 - protein, 9 aa, Artificial Sequence
  source: /note="Description of Artificial Sequence: Synthetic peptide"
LQHDNFPLT

SEQ ID NO: 657 - protein, 11 aa, Artificial Sequence
  source: /note="Description of Artificial Sequence: Synthetic peptide"
RASQDIYNNLA

SEQ ID NO: 658 - protein, 7 aa, Artificial Sequence
  source: /note="Description of Artificial Sequence: Synthetic peptide"
AANKSQS

SEQ ID NO: 659 - protein, 9 aa, Artificial Sequence
  source: /note="Description of Artificial Sequence: Synthetic peptide"
QHYYRFPYS

SEQ ID NO: 660 - protein, 11 aa, Artificial Sequence
  source: /note="Description of Artificial Sequence: Synthetic peptide"
GGNNIGTKSVH

SEQ ID NO: 661 - protein, 7 aa, Artificial Sequence
  source: /note="Description of Artificial Sequence: Synthetic peptide"
DDSVRPS

SEQ ID NO: 662 - protein, 11 aa, Artificial Sequence
  source: /note="Description of Artificial Sequence: Synthetic peptide"
QVWDSDSEHVV

SEQ ID NO: 663 - protein, 11 aa, Artificial Sequence
  source: /note="Description of Artificial Sequence: Synthetic peptide"
SGDGLSKKYVS

SEQ ID NO: 664 - protein, 7 aa, Artificial Sequence
  source: /note="Description of Artificial Sequence: Synthetic peptide"
RDKERPS

SEQ ID NO: 665 - protein, 9 aa, Artificial Sequence
  source: /note="Description of Artificial Sequence: Synthetic peptide"
QAWDDTTVV

SEQ ID NO: 666 - protein, 11 aa, Artificial Sequence
  source: /note="Description of Artificial Sequence: Synthetic peptide"
RASQGIRNWLA

SEQ ID NO: 667 - protein, 7 aa, Artificial Sequence
  source: /note="Description of Artificial Sequence: Synthetic peptide"
AASNLQS

SEQ ID NO: 668 - protein, 9 aa, Artificial Sequence
  source: /note="Description of Artificial Sequence: Synthetic peptide"
QKYNSAPFT

SEQ ID NO: 669 - protein, 11 aa, Artificial Sequence
  source: /note="Description of Artificial Sequence: Synthetic peptide"
GGNNIGSKSVH

SEQ ID NO: 670 - protein, 7 aa, Artificial Sequence
  source: /note="Description of Artificial Sequence: Synthetic peptide"
GKNNRPS

SEQ ID NO: 671 - protein, 12 aa, Artificial Sequence
  source: /note="Description of Artificial Sequence: Synthetic peptide"
SSRDSSGDHLRV

SEQ ID NO: 672 - protein, 11 aa, Artificial Sequence
  source: /note="Description of Artificial Sequence: Synthetic peptide"
QGDSLGNYYAT

SEQ ID NO: 673 - protein, 7 aa, Artificial Sequence
  source: /note="Description of Artificial Sequence: Synthetic peptide"
GTNNRPS

SEQ ID NO: 674 - protein, 11 aa, Artificial Sequence
  source: /note="Description of Artificial Sequence: Synthetic peptide"
NSRDSSGHHLL

SEQ ID NO: 675 - protein, 12 aa, Artificial Sequence
  source: /note="Description of Artificial Sequence: Synthetic peptide"
RASQSVSSAYLA

SEQ ID NO: 676 - protein, 14 aa, Artificial Sequence
  source: /note="Description of Artificial Sequence: Synthetic peptide"
QHYGSSFNGSSLFT

SEQ ID NO: 677 - protein, 11 aa, Artificial Sequence
  source: /note="Description of Artificial Sequence: Synthetic peptide"
RASQSVSNSLA

SEQ ID NO: 678 - protein, 7 aa, Artificial Sequence
  source: /note="Description of Artificial Sequence: Synthetic peptide"
DASSRAT

SEQ ID NO: 679 - protein, 10 aa, Artificial Sequence
  source: /note="Description of Artificial Sequence: Synthetic peptide"
QQFGTSSGLT

SEQ ID NO: 680 - protein, 12 aa, Artificial Sequence
  source: /note="Description of Artificial Sequence: Synthetic peptide"
RASQSVSSSFLA

SEQ ID NO: 681 - protein, 7 aa, Artificial Sequence
  source: /note="Description of Artificial Sequence: Synthetic peptide"
GASSRAT

SEQ ID NO: 682 - protein, 12 aa, Artificial Sequence
  source: /note="Description of Artificial Sequence: Synthetic peptide"
RASQSVSTTFLA

SEQ ID NO: 683 - protein, 7 aa, Artificial Sequence
  source: /note="Description of Artificial Sequence: Synthetic peptide"
GSSNRAT

SEQ ID NO: 684 - protein, 9 aa, Artificial Sequence
  source: /note="Description of Artificial Sequence: Synthetic peptide"
QQSYSTPYS

SEQ ID NO: 685 - protein, 12 aa, Artificial Sequence
  source: /note="Description of Artificial Sequence: Synthetic peptide"
RATQSIGSSFLA

SEQ ID NO: 686 - protein, 7 aa, Artificial Sequence
  source: /note="Description of Artificial Sequence: Synthetic peptide"
GASQRAT

SEQ ID NO: 687 - protein, 10 aa, Artificial Sequence
  source: /note="Description of Artificial Sequence: Synthetic peptide"
QHYESSPSWT

SEQ ID NO: 688 - protein, 12 aa, Artificial Sequence
  source: /note="Description of Artificial Sequence: Synthetic peptide"
RASQSVSSSYLA

SEQ ID NO: 689 - protein, 10 aa, Artificial Sequence
  source: /note="Description of Artificial Sequence: Synthetic peptide"
QQYGSPPRFT

SEQ ID NO: 690 - protein, 10 aa, Artificial Sequence
  source: /note="Description of Artificial Sequence: Synthetic peptide"
QHYGSSPSWT

SEQ ID NO: 691 - protein, 12 aa, Artificial Sequence
  source: /note="Description of Artificial Sequence: Synthetic peptide"
RASQRVASNYLA

SEQ ID NO: 692 - protein, 10 aa, Artificial Sequence
  source: /note="Description of Artificial Sequence: Synthetic peptide"
QHYDSSPSWT

SEQ ID NO: 693 - protein, 12 aa, Artificial Sequence
  source: /note="Description of Artificial Sequence: Synthetic peptide"
RASQSLSSNFLA

SEQ ID NO: 694 - protein, 7 aa, Artificial Sequence
  source: /note="Description of Artificial Sequence: Synthetic peptide"
GASNWAT

SEQ ID NO: 695 - protein, 10 aa, Artificial Sequence
  source: /note="Description of Artificial Sequence: Synthetic peptide"
QYYGTSPMYT

SEQ ID NO: 696 - protein, 9 aa, Artificial Sequence
  source: /note="Description of Artificial Sequence: Synthetic peptide"
MQALQTPLT

SEQ ID NO: 697 - protein, 7 aa, Artificial Sequence
  source: /note="Description of Artificial Sequence: Synthetic peptide"
GTSSRAT

SEQ ID NO: 698 - protein, 11 aa, Artificial Sequence
  source: /note="Description of Artificial Sequence: Synthetic peptide"
QHYGNSPPKFT

SEQ ID NO: 699 - protein, 12 aa, Artificial Sequence
  source: /note="Description of Artificial Sequence: Synthetic peptide"
RASQSVASSFLA

SEQ ID NO: 700 - protein, 7 aa, Artificial Sequence
  source: /note="Description of Artificial Sequence: Synthetic peptide"
GASGRAT

SEQ ID NO: 701 - protein, 10 aa, Artificial Sequence
  source: /note="Description of Artificial Sequence: Synthetic peptide"
QHYGGSPRLT

SEQ ID NO: 702 - protein, 11 aa, Artificial Sequence
  source: /note="Description of Artificial Sequence: Synthetic peptide"
RASQDVNTAVS

SEQ ID NO: 703 - protein, 7 aa, Artificial Sequence
  source: /note="Description of Artificial Sequence: Synthetic peptide"
SASYRYT

SEQ ID NO: 704 - protein, 9 aa, Artificial Sequence
  source: /note="Description of Artificial Sequence: Synthetic peptide"
QQHYSTPWT

SEQ ID NO: 705 - protein, 15 aa, Artificial Sequence
  source: /note="Description of Artificial Sequence: Synthetic peptide"
RASESVSVIGAHLIH

SEQ ID NO: 706 - protein, 7 aa, Artificial Sequence
  source: /note="Description of Artificial Sequence: Synthetic peptide"
LASNLET

SEQ ID NO: 707 - protein, 9 aa, Artificial Sequence
  source: /note="Description of Artificial Sequence: Synthetic peptide"
LQSRIFPRT

SEQ ID NO: 708 - protein, 15 aa, Artificial Sequence
  source: /note="Description of Artificial Sequence: Synthetic peptide"
RASESVTILGSHLIY

SEQ ID NO: 709 - protein, 7 aa, Artificial Sequence
  source: /note="Description of Artificial Sequence: Synthetic peptide"
LASNVQT

SEQ ID NO: 710 - protein, 9 aa, Artificial Sequence
  source: /note="Description of Artificial Sequence: Synthetic peptide"
LQSRTIPRT

SEQ ID NO: 711-723 - skipped (13 entries)

SEQ ID NO: 724 - protein, 485 aa, Artificial Sequence
  source: /note="Description of Artificial Sequence: Synthetic polypeptide"
MALPVTALLLPLALLLHAARPQVQLVQSGAEVEKPGASVKVSCKASGYTFTDYYMHWVRQAPGQGLEWMGWINPNSGGTNYAQKFQGRVTMTRDTSISTAYMELSRLRSDDTAVYYCASGWDFDYWGQGTLVTVSSGGGGSGGGGSGGGGSGGGGSDIVMTQSPSSLSASVGDRVTITCRASQSIRYYLSWYQQKPGKAPKLLIYTASILQNGVPSRFSGSGSGTDFTLTISSLQPEDFATYYCLQTYTTPDFGPGTKVEIKTTTPAPRPPTPAPTIASQPLSLRPEACRPAAGGAVHTRGLDFACDIYIWAPLAGTCGVLLLSLVITLYCKRGRKKLLYIFKQPFMRPVQTTQEEDGCSCRFPEEEEGGCELRVKFSRSADAPAYKQGQNQLYNELNLGRREEYDVLDKRRGRDPEMGGKPRRKNPQEGLYNELQKDKMAEAYSEIGMKGERRRGKGHDGLYQGLSTATKDTYDALHMQALPPR

SEQ ID NO: 725 - protein, 485 aa, Artificial Sequence
  source: /note="Description of Artificial Sequence: Synthetic polypeptide"
MALPVTALLLPLALLLHAARPQVQLQQSGAEVKKPGASVKVSCKASGYTFTGYYMHWVRQAPGQGLEWMGWINPNSGGTNYAQNFQGRVTMTRDTSISTAYMELRRLRSDDTAVYYCASGWDFDYWGQGTLVTVSSGGGGSGGGGSGGGGSGGGGSDIRMTQSPSSLSASVGDRVTITCRASQSIRYYLSWYQQKPGKAPKLLIYTASILQNGVPSRFSGSGSGTDFTLTISSLQPEDFATYYCLQTYTTPDFGPGTKVEIKTTTPAPRPPTPAPTIASQPLSLRPEACRPAAGGAVHTRGLDFACDIYIWAPLAGTCGVLLLSLVITLYCKRGRKKLLYIFKQPFMRPVQTTQEEDGCSCRFPEEEEGGCELRVKFSRSADAPAYKQGQNQLYNELNLGRREEYDVLDKRRGRDPEMGGKPRRKNPQEGLYNELQKDKMAEAYSEIGMKGERRRGKGHDGLYQGLSTATKDTYDALHMQALPPR

SEQ ID NO: 726 - protein, 383 aa, Artificial Sequence
  source: /note="Description of Artificial Sequence: Synthetic polypeptide"
MALPVTALLLPLALLLHAARPQVQLQQSGPELEKPGASVKISCKASGYSFTGYTMNWVKQSHGKSLEWIGLITPYNGASSYNQKFRGKATLTVDKSSSTAYMDLLSLTSEDSAVYFCARGGYDGRGFDYWGQGTTVTVSSGGGGSGGGGSGGGGSDIELTQSPAIMSASPGEKVTMTCSASSSVSYMHWYQQKSGTSPKRWIYDTSKLASGVPGRFSGSGSGNSYSLTISSVEAEDDATYYCQQWSGYPLTFGAGTKLEITTTPAPRPPTPAPTIASQPLSLRPEACRPAAGGAVHTRGLDFACDIYIWAPLAGTCGVLLLSLVITLYCKRGRKKLLYIFKQPFMRPVQTTQEEDGCSCRFPEEEEGGCELRVKFSRSADAPA

SEQ ID NO: 727 - protein, 488 aa, Artificial Sequence
  source: /note="Description of Artificial Sequence: Synthetic polypeptide"
MALPVTALLLPLALLLHAARPQVQLQQSGAEVKKPGASVKVSCKASGYTFTGYYMHWVRQAPGQGLEWMGRINPNSGGTNYAQKFQGRVTMTRDTSISTAYMELSRLRSEDTAVYYCARGRYYGMDVWGQGTMVTVSSGGGGSGGGGSGGGGSGGGGSEIVLTQSPATLSLSPGERATISCRASQSVSSNFAWYQQRPGQAPRLLIYDASNRATGIPPRFSGSGSGTDFTLTISSLEPEDFAAYYCHQRSNWLYTFGQGTKVDIKTTTPAPRPPTPAPTIASQPLSLRPEACRPAAGGAVHTRGLDFACDIYIWAPLAGTCGVLLLSLVITLYCKRGRKKLLYIFKQPFMRPVQTTQEEDGCSCRFPEEEEGGCELRVKFSRSADAPAYKQGQNQLYNELNLGRREEYDVLDKRRGRDPEMGGKPRRKNPQEGLYNELQKDKMAEAYSEIGMKGERRRGKGHDGLYQGLSTATKDTYDALHMQALPPR

SEQ ID NO: 728 - protein, 497 aa, Artificial Sequence
  source: /note="Description of Artificial Sequence: Synthetic polypeptide"
MALPVTALLLPLALLLHAARPQVQLVQSGAEVKKPGASVKVSCKASGYTFTGYYMHWVRQAPGQGLEWMGWINPNSGGTNYAQKFQGRVTMTRDTSISTAYMELSRLRSDDTAVYYCARDLRRTVVTPRAYYGMDVWGQGTTVTVSSGGGGSGGGGSGGGGSGGGGSDIQLTQSPSTLSASVGDRVTITCQASQDISNSLNWYQQKAGKAPKLLIYDASTLETGVPSRFSGSGSGTDFSFTISSLQPEDIATYYCQQHDNLPLTFGQGTKVEIKTTTPAPRPPTPAPTIASQPLSLRPEACRPAAGGAVHTRGLDFACDIYIWAPLAGTCGVLLLSLVITLYCKRGRKKLLYIFKQPFMRPVQTTQEEDGCSCRFPEEEEGGCELRVKFSRSADAPAYKQGQNQLYNELNLGRREEYDVLDKRRGRDPEMGGKPRRKNPQEGLYNELQKDKMAEAYSEIGMKGERRRGKGHDGLYQGLSTATKDTYDALHMQALPPR

SEQ ID NO: 729 - protein, 490 aa, Artificial Sequence
  source: /note="Description of Artificial Sequence: Synthetic polypeptide"
MALPVTALLLPLALLLHAARPQVQLVQSGAEVKKPGAPVKVSCKASGYTFTGYYMHWVRQAPGQGLEWMGWINPNSGGTNYAQKFQGRVTMTRDTSISTAYMELSRLRSDDTAVYYCARGEWDGSYYYDYWGQGTLVTVSSGGGGSGGGGSGGGGSGGGGSDIVLTQTPSSLSASVGDRVTITCRASQSINTYLNWYQHKPGKAPKLLIYAASSLQSGVPSRFSGSGSGTDFTLTISSLQPEDFATYYCQQSFSPLTFGGGTKLEIKTTTPAPRPPTPAPTIASQPLSLRPEACRPAAGGAVHTRGLDFACDIYIWAPLAGTCGVLLLSLVITLYCKRGRKKLLYIFKQPFMRPVQTTQEEDGCSCRFPEEEEGGCELRVKFSRSADAPAYKQGQNQLYNELNLGRREEYDVLDKRRGRDPEMGGKPRRKNPQEGLYNELQKDKMAEAYSEIGMKGERRRGKGHDGLYQGLSTATKDTYDALHMQALPPR

SEQ ID NO: 730 - protein, 486 aa, Artificial Sequence
  source: /note="Description of Artificial Sequence: Synthetic polypeptide"
MALPVTALLLPLALLLHAARPQVQLVESGGGLVQPGGSLRLSCAASGFTFSSYWMHWVRQVPGKGLVWVSRINTDGSTTTYADSVEGRFTISRDNAKNTLYLQMNSLRDDDTAVYYCVGGHWAVWGQGTTVTVSSGGGGSGGGGSGGGGSGGGGSDIQMTQSPSTLSASVGDRVTITCRASQSISDRLAWYQQKPGKAPKLLIYKASSLESGVPSRFSGSGSGTEFTLTISSLQPDDFAVYYCQQYGHLPMYTFGQGTKVEIKTTTPAPRPPTPAPTIASQPLSLRPEACRPAAGGAVHTRGLDFACDIYIWAPLAGTCGVLLLSLVITLYCKRGRKKLLYIFKQPFMRPVQTTQEEDGCSCRFPEEEEGGCELRVKFSRSADAPAYKQGQNQLYNELNLGRREEYDVLDKRRGRDPEMGGKPRRKNPQEGLYNELQKDKMAEAYSEIGMKGERRRGKGHDGLYQGLSTATKDTYDALHMQALPPR

SEQ ID NO: 731 - protein, 497 aa, Artificial Sequence
  source: /note="Description of Artificial Sequence: Synthetic polypeptide"
MALPVTALLLPLALLLHAARPQVQLVQSGAEVKKPGASVKVSCKASGYTFTSYYMHWVRQAPGQGLEWMGIINPSGGSTSYAQKFQGRVTMTRDTSTSTVYMELSSLRSEDTAVYYCARYRLIAVAGDYYYYGMDVWGQGTMVTVSSGGGGSGGGGSGGGGSGGGGSDIQMTQSPSSVSASVGDRVTITCRASQGVGRWLAWYQQKPGTAPKLLIYAASTLQSGVPSRFSGSGSGTDFTLTINNLQPEDFATYYCQQANSFPLTFGGGTRLEIKTTTPAPRPPTPAPTIASQPLSLRPEACRPAAGGAVHTRGLDFACDIYIWAPLAGTCGVLLLSLVITLYCKRGRKKLLYIFKQPFMRPVQTTQEEDGCSCRFPEEEEGGCELRVKFSRSADAPAYKQGQNQLYNELNLGRREEYDVLDKRRGRDPEMGGKPRRKNPQEGLYNELQKDKMAEAYSEIGMKGERRRGKGHDGLYQGLSTATKDTYDALHMQALPPR

SEQ ID NO: 732 - protein, 494 aa, Artificial Sequence
  source: /note="Description of Artificial Sequence: Synthetic polypeptide"
MALPVTALLLPLALLLHAARPQVQLVQSGGGVVQPGRSLRLSCAASGFTFSSYAMHWVRQAPGKGLEWVAVISYDGSNKYYADSVKGRFTISRDNSKNTLYLQMNSLRAEDTAVYYCARWKVSSSSPAFDYWGQGTLVTVSSGGGGSGGGGSGGGGSGGGGSEIVLTQSPATLSLSPGERAILSCRASQSVYTKYLGWYQQKPGQAPRLLIYDASTRATGIPDRFSGSGSGTDFTLTINRLEPEDFAVYYCQHYGGSPLITFGQGTRLEIKTTTPAPRPPTPAPTIASQPLSLRPEACRPAAGGAVHTRGLDFACDIYIWAPLAGTCGVLLLSLVITLYCKRGRKKLLYIFKQPFMRPVQTTQEEDGCSCRFPEEEEGGCELRVKFSRSADAPAYKQGQNQLYNELNLGRREEYDVLDKRRGRDPEMGGKPRRKNPQEGLYNELQKDKMAEAYSEIGMKGERRRGKGHDGLYQGLSTATKDTYDALHMQALPPR

SEQ ID NO: 733 - protein, 490 aa, Artificial Sequence
  source: /note="Description of Artificial Sequence: Synthetic polypeptide"
MALPVTALLLPLALLLHAARPQVQLQQSGAEVKKPGASVKVSCKTSGYPFTGYSLHWVRQAPGQGLEWMGWINPNSGGTNYAQKFQGRVTMTRDTSISTAYMELSRLRSDDTAVYYCARDHYGGNSLFYWGQGTLVTVSSGGGGSGGGGSGGGGSGGGGSDIQLTQSPSSISASVGDTVSITCRASQDSGTWLAWYQQKPGKAPNLLMYDASTLEDGVPSRFSGSASGTEFTLTVNRLQPEDSATYYCQQYNSYPLTFGGGTKVDIKTTTPAPRPPTPAPTIASQPLSLRPEACRPAAGGAVHTRGLDFACDIYIWAPLAGTCGVLLLSLVITLYCKRGRKKLLYIFKQPFMRPVQTTQEEDGCSCRFPEEEEGGCELRVKFSRSADAPAYKQGQNQLYNELNLGRREEYDVLDKRRGRDPEMGGKPRRKNPQEGLYNELQKDKMAEAYSEIGMKGERRRGKGHDGLYQGLSTATKDTYDALHMQALPPR

SEQ ID NO: 734 - protein, 492 aa, Artificial Sequence
  source: /note="Description of Artificial Sequence: Synthetic polypeptide"
MALPVTALLLPLALLLHAARPQVQLVQSGAEVKKPGASVEVSCKASGYTFTSYYMHWVRQAPGQGLEWMGIINPSGGSTGYAQKFQGRVTMTRDTSTSTVHMELSSLRSEDTAVYYCARGGYSSSSDAFDIWGQGTMVTVSSGGGGSGGGGSGGGGSGGGGSDIQMTQSPPSLSASVGDRVTITCRASQDISSALAWYQQKPGTPPKLLIYDASSLESGVPSRFSGSGSGTDFTLTISSLQPEDFATYYCQQFSSYPLTFGGGTRLEIKTTTPAPRPPTPAPTIASQPLSLRPEACRPAAGGAVHTRGLDFACDIYIWAPLAGTCGVLLLSLVITLYCKRGRKKLLYIFKQPFMRPVQTTQEEDGCSCRFPEEEEGGCELRVKFSRSADAPAYKQGQNQLYNELNLGRREEYDVLDKRRGRDPEMGGKPRRKNPQEGLYNELQKDKMAEAYSEIGMKGERRRGKGHDGLYQGLSTATKDTYDALHMQALPPR

SEQ ID NO: 735 - protein, 499 aa, Artificial Sequence
  source: /note="Description of Artificial Sequence: Synthetic polypeptide"
MALPVTALLLPLALLLHAARPQVQLVQSGAEVKKPGASVKVSCKASGYTFTSYGISWVRQAPGQGLEWMGWISAYNGNTNYAQKLQGRVTMTTDTSTSTAYMELRSLRSDDTAVYYCARVAGGIYYYYGMDVWGQGTTITVSSGGGGSGGGGSGGGGSGGGGSDIVMTQTPDSLAVSLGERATISCKSSHSVLYNRNNKNYLAWYQQKPGQPPKLLFYWASTRKSGVPDRFSGSGSGTDFTLTISSLQPEDFATYFCQQTQTFPLTFGQGTRLEINTTTPAPRPPTPAPTIASQPLSLRPEACRPAAGGAVHTRGLDFACDIYIWAPLAGTCGVLLLSLVITLYCKRGRKKLLYIFKQPFMRPVQTTQEEDGCSCRFPEEEEGGCELRVKFSRSADAPAYKQGQNQLYNELNLGRREEYDVLDKRRGRDPEMGGKPRRKNPQEGLYNELQKDKMAEAYSEIGMKGERRRGKGHDGLYQGLSTATKDTYDALHMQALPPR

SEQ ID NO: 736 - protein, 490 aa, Artificial Sequence
  source: /note="Description of Artificial Sequence: Synthetic polypeptide"
MALPVTALLLPLALLLHAARPQVQLVQSGAEVKKPGASVKVSCKASGYTFTGYYMHWVRQAPGQGLEWMGRINPNSGGTNYAQKFQGRVTMTTDTSTSTAYMELRSLRSDDTAVYYCARTTTSYAFDIWGQGTMVTVSSGGGGSGGGGSGGGGSGGGGSDIQLTQSPSTLSASVGDRVTITCRASQSISTWLAWYQQKPGKAPNLLIYKASTLESGVPSRFSGSGSGTEFTLTISSLQPDDFATYYCQQYNTYSPYTFGQGTKLEIKTTTPAPRPPTPAPTIASQPLSLRPEACRPAAGGAVHTRGLDFACDIYIWAPLAGTCGVLLLSLVITLYCKRGRKKLLYIFKQPFMRPVQTTQEEDGCSCRFPEEEEGGCELRVKFSRSADAPAYKQGQNQLYNELNLGRREEYDVLDKRRGRDPEMGGKPRRKNPQEGLYNELQKDKMAEAYSEIGMKGERRRGKGHDGLYQGLSTATKDTYDALHMQALPPR

SEQ ID NO: 737 - protein, 493 aa, Artificial Sequence
  source: /note="Description of Artificial Sequence: Synthetic polypeptide"
MALPVTALLLPLALLLHAARPQVQLVQSGGGLVKPGGSLRLSCEASGFIFSDYYMGWIRQAPGKGLEWVSYIGRSGSSMYYADSVKGRFTFSRDNAKNSLYLQMNSLRAEDTAVYYCAASPVVAATEDFQHWGQGTLVTVSSGGGGSGGGGSGGGGSGGGGSDIVMTQTPATLSLSPGERATLSCRASQSVTSNYLAWYQQKPGQAPRLLLFGASTRATGIPDRFSGSGSGTDFTLTINRLEPEDFAMYYCQQYGSAPVTFGQGTKLEIKTTTPAPRPPTPAPTIASQPLSLRPEACRPAAGGAVHTRGLDFACDIYIWAPLAGTCGVLLLSLVITLYCKRGRKKLLYIFKQPFMRPVQTTQEEDGCSCRFPEEEEGGCELRVKFSRSADAPAYKQGQNQLYNELNLGRREEYDVLDKRRGRDPEMGGKPRRKNPQEGLYNELQKDKMAEAYSEIGMKGERRRGKGHDGLYQGLSTATKDTYDALHMQALPPR

SEQ ID NO: 738 - protein, 493 aa, Artificial Sequence
  source: /note="Description of Artificial Sequence: Synthetic polypeptide"
MALPVTALLLPLALLLHAARPQVQLVQSGAEVRAPGASVKISCKASGFTFRGYYIHWVRQAPGQGLEWMGIINPSGGSRAYAQKFQGRVTMTRDTSTSTVYMELSSLRSDDTAMYYCARTASCGGDCYYLDYWGQGTLVTVSSGGGGSGGGGSGGGGSGGGGSDIQMTQSPPTLSASVGDRVTITCRASENVNIWLAWYQQKPGKAPKLLIYKSSSLASGVPSRFSGSGSGAEFTLTISSLQPDDFATYYCQQYQSYPLTFGGGTKVDIKTTTPAPRPPTPAPTIASQPLSLRPEACRPAAGGAVHTRGLDFACDIYIWAPLAGTCGVLLLSLVITLYCKRGRKKLLYIFKQPFMRPVQTTQEEDGCSCRFPEEEEGGCELRVKFSRSADAPAYKQGQNQLYNELNLGRREEYDVLDKRRGRDPEMGGKPRRKNPQEGLYNELQKDKMAEAYSEIGMKGERRRGKGHDGLYQGLSTATKDTYDALHMQALPPR

SEQ ID NO: 739 - protein, 488 aa, Artificial Sequence
  source: /note="Description of Artificial Sequence: Synthetic polypeptide"
MALPVTALLLPLALLLHAARPQVQLVQSGGGLVQPGRSLRLSCAASGFTFDDYAMHWVRQAPGKGLEWVSGISWNSGSIGYADSVKGRFTISRDNAKNSLYLQMNSLRAEDTAVYYCAKDGSSSWSWGYFDYWGQGTLVTVSSGGGGSGGGGSGGGGSSSELTQDPAVSVALGQTVRTTCQGDALRSYYASWYQQKPGQAPMLVIYGKNNRPSGIPDRFSGSDSGDTASLTITGAQAEDEADYYCNSRDSSGYPVFGTGTKVTVLTTTPAPRPPTPAPTIASQPLSLRPEACRPAAGGAVHTRGLDFACDIYIWAPLAGTCGVLLLSLVITLYCKRGRKKLLYIFKQPFMRPVQTTQEEDGCSCRFPEEEEGGCELRVKFSRSADAPAYKQGQNQLYNELNLGRREEYDVLDKRRGRDPEMGGKPRRKNPQEGLYNELQKDKMAEAYSEIGMKGERRRGKGHDGLYQGLSTATKDTYDALHMQALPPR

SEQ ID NO: 740 - protein, 490 aa, Artificial Sequence
  source: /note="Description of Artificial Sequence: Synthetic polypeptide"
MALPVTALLLPLALLLHAARPEVQLVESGGGLVQPGRSLRLSCAASGFTFDDYAMHWVRQAPGKGLEWVSGISWNSGSTGYADSVKGRFTISRDNAKNSLYLQMNSLRAEDTALYYCAKDSSSWYGGGSAFDIWGQGTMVTVSSGGGGSGGGGSGGGGSSSELTQEPAVSVALGQTVRITCQGDSLRSYYASWYQQKPGQAPVLVIFGRSRRPSGIPDRFSGSSSGNTASLIITGAQAEDEADYYCNSRDNTANHYVFGTGTKLTVLTTTPAPRPPTPAPTIASQPLSLRPEACRPAAGGAVHTRGLDFACDIYIWAPLAGTCGVLLLSLVITLYCKRGRKKLLYIFKQPFMRPVQTTQEEDGCSCRFPEEEEGGCELRVKFSRSADAPAYKQGQNQLYNELNLGRREEYDVLDKRRGRDPEMGGKPRRKNPQEGLYNELQKDKMAEAYSEIGMKGERRRGKGHDGLYQGLSTATKDTYDALHMQALPPR

SEQ ID NO: 741 - protein, 490 aa, Artificial Sequence
  source: /note="Description of Artificial Sequence: Synthetic polypeptide"
MALPVTALLLPLALLLHAARPEVQLVESGGGLVQPGRSLRLSCAASGFTFDDYAMHWVRQAPGKGLEWVSGISWNSGSTGYADSVKGRFTISRDNAKNSLYLQMNSLRAEDTALYYCAKDSSSWYGGGSAFDIWGQGTMVTVSSGGGGSGGGGSGGGGSSSELTQDPAVSVALGQTVRITCQGDSLRSYYASWYQQKPGQAPVLVIYGKNNRPSGIPDRFSGSSSGNTASLTITGAQAEDEADYYCNSRGSSGNHYVFGTGTKVTVLTTTPAPRPPTPAPTIASQPLSLRPEACRPAAGGAVHTRGLDFACDIYIWAPLAGTCGVLLLSLVITLYCKRGRKKLLYIFKQPFMRPVQTTQEEDGCSCRFPEEEEGGCELRVKFSRSADAPAYKQGQNQLYNELNLGRREEYDVLDKRRGRDPEMGGKPRRKNPQEGLYNELQKDKMAEAYSEIGMKGERRRGKGHDGLYQGLSTATKDTYDALHMQALPPR

SEQ ID NO: 742 - protein, 495 aa, Artificial Sequence
  source: /note="Description of Artificial Sequence: Synthetic polypeptide"
MALPVTALLLPLALLLHAARPQVQLVQSGGGLVQPGGSLRLSCAASGFTFSSYWMHWVRQAPGKGLVWVSRINSDGSSTSYADSVKGRFTISRDNAKNTLYLQMNSLRAEDTAVYYCVRTGWVGSYYYYMDVWGKGTTVTVSSGGGGSGGGGSGGGGSGGGGSEIVLTQSPGTLSLSPGERATLSCRASQSVSSNYLAWYQQKPGQPPRLLIYDVSTRATGIPARFSGGGSGTDFTLTISSLEPEDFAVYYCQQRSNWPPWTFGQGTKVEIKTTTPAPRPPTPAPTIASQPLSLRPEACRPAAGGAVHTRGLDFACDIYIWAPLAGTCGVLLLSLVITLYCKRGRKKLLYIFKQPFMRPVQTTQEEDGCSCRFPEEEEGGCELRVKFSRSADAPAYKQGQNQLYNELNLGRREEYDVLDKRRGRDPEMGGKPRRKNPQEGLYNELQKDKMAEAYSEIGMKGERRRGKGHDGLYQGLSTATKDTYDALHMQALPPR

SEQ ID NO: 743 - protein, 494 aa, Artificial Sequence
  source: /note="Description of Artificial Sequence: Synthetic polypeptide"
MALPVTALLLPLALLLHAARPQVQLVQSGGGVVQPGRSLRLSCAASGFTFSSYGMHWVRQAPGKGLEWVAVISYDGSNKYYADSVKGRFTISRDNSKNTLYLQMNSLRAEDTAVYYCAKGYSRYYYYGMDVWGQGTTVTVSSGGGGSGGGGSGGGGSGGGGSEIVMTQSPATLSLSPGERAILSCRASQSVYTKYLGWYQQKPGQAPRLLIYDASTRATGIPDRFSGSGSGTDFTLTINRLEPEDFAVYYCQHYGGSPLITFGQGTKVDIKTTTPAPRPPTPAPTIASQPLSLRPEACRPAAGGAVHTRGLDFACDIYIWAPLAGTCGVLLLSLVITLYCKRGRKKLLYIFKQPFMRPVQTTQEEDGCSCRFPEEEEGGCELRVKFSRSADAPAYKQGQNQLYNELNLGRREEYDVLDKRRGRDPEMGGKPRRKNPQEGLYNELQKDKMAEAYSEIGMKGERRRGKGHDGLYQGLSTATKDTYDALHMQALPPR

SEQ ID NO: 744 - protein, 493 aa, Artificial Sequence
  source: /note="Description of Artificial Sequence: Synthetic polypeptide"
MALPVTALLLPLALLLHAARPQVQLVQSGGGLVQPGGSLRLSCAASGFTFSSYAMSWVRQAPGKGLEWVSAISGSGGSTYYADSVKGRFTISRDNSKNTLYLQMNSLRAEDTAVYYCAKREAAAGHDWYFDLWGRGTLVTVSSGGGGSGGGGSGGGGSGGGGSDIRVTQSPSSLSASVGDRVTITCRASQSISSYLNWYQQKPGKAPKLLIYAASSLQSGVPSRFSGSGSGTDFTLTISSLQPEDFATYYCQQSYSIPLTFGQGTKVEIKTTTPAPRPPTPAPTIASQPLSLRPEACRPAAGGAVHTRGLDFACDIYIWAPLAGTCGVLLLSLVITLYCKRGRKKLLYIFKQPFMRPVQTTQEEDGCSCRFPEEEEGGCELRVKFSRSADAPAYKQGQNQLYNELNLGRREEYDVLDKRRGRDPEMGGKPRRKNPQEGLYNELQKDKMAEAYSEIGMKGERRRGKGHDGLYQGLSTATKDTYDALHMQALPPR

SEQ ID NO: 745 - protein, 491 aa, Artificial Sequence
  source: /note="Description of Artificial Sequence: Synthetic polypeptide"
MALPVTALLLPLALLLHAARPQVQLVQSWAEVKKPGASVKVSCKASGYTFTSYYMHWVRQAPGQGLEWMGIINPSGGSTSYAQKFQGRVTMTRDTSTSTVYMELSNLRSEDTAVYYCARSPRVTTGYFDYWGQGTLVTVSSGGGGSGGGGSGGGGSGGGGSDIQLTQSPSTLSASVGDRVTITCRASQSISSWLAWYQQKPGKAPKLLIYKASSLESGVPSRFSGSGSGTEFTLTISSLQPDDFATYYCQQYSSYPLTFGGGTRLEIKTTTPAPRPPTPAPTIASQPLSLRPEACRPAAGGAVHTRGLDFACDIYIWAPLAGTCGVLLLSLVITLYCKRGRKKLLYIFKQPFMRPVQTTQEEDGCSCRFPEEEEGGCELRVKFSRSADAPAYKQGQNQLYNELNLGRREEYDVLDKRRGRDPEMGGKPRRKNPQEGLYNELQKDKMAEAYSEIGMKGERRRGKGHDGLYQGLSTATKDTYDALHMQALPPR

SEQ ID NO: 746 - protein, 497 aa, Artificial Sequence
  source: /note="Description of Artificial Sequence: Synthetic polypeptide"
MALPVTALLLPLALLLHAARPQVQLVQSGAEVRRPGASVKISCRASGDTSTRHYIHWLRQAPGQGPEWMGVINPTTGPATGSPAYAQMLQGRVTMTRDTSTRTVYMELRSLRFEDTAVYYCARSVVGRSAPYYFDYWGQGTLVTVSSGGGGSGGGGSGGGGSGGGGSDIQMTQSPSSLSASVGDRVTITCRASQGISDYSAWYQQKPGKAPKLLIYAASTLQSGVPSRFSGSGSGTDFTLTISYLQSEDFATYYCQQYYSYPLTFGGGTKVDIKTTTPAPRPPTPAPTIASQPLSLRPEACRPAAGGAVHTRGLDFACDIYIWAPLAGTCGVLLLSLVITLYCKRGRKKLLYIFKQPFMRPVQTTQEEDGCSCRFPEEEEGGCELRVKFSRSADAPAYKQGQNQLYNELNLGRREEYDVLDKRRGRDPEMGGKPRRKNPQEGLYNELQKDKMAEAYSEIGMKGERRRGKGHDGLYQGLSTATKDTYDALHMQALPPR

SEQ ID NO: 747 - protein, 493 aa, Artificial Sequence
  source: /note="Description of Artificial Sequence: Synthetic polypeptide"
MALPVTALLLPLALLLHAARPQVQLQQSGAEVKKPGASVKVSCKASGYTFTNYYMHWVRQAPGQGLEWMGIINPSGGYTTYAQKFQGRLTMTRDTSTSTVYMELSSLRSEDTAVYYCARIRSCGGDCYYFDNWGQGTLVTVSSGGGGSGGGGSGGGGSGGGGSDIQLTQSPSTLSASVGDRVTITCRASENVNIWLAWYQQKPGKAPKLLIYKSSSLASGVPSRFSGSGSGAEFTLTISSLQPDDFATYYCQQYQSYPLTFGGGTKVDIKTTTPAPRPPTPAPTIASQPLSLRPEACRPAAGGAVHTRGLDFACDIYIWAPLAGTCGVLLLSLVITLYCKRGRKKLLYIFKQPFMRPVQTTQEEDGCSCRFPEEEEGGCELRVKFSRSADAPAYKQGQNQLYNELNLGRREEYDVLDKRRGRDPEMGGKPRRKNPQEGLYNELQKDKMAEAYSEIGMKGERRRGKGHDGLYQGLSTATKDTYDALHMQALPPR

SEQ ID NO: 748 - protein, 490 aa, Artificial Sequence
  source: /note="Description of Artificial Sequence: Synthetic polypeptide"
MALPVTALLLPLALLLHAARPQITLKESGPALVKPTQTLTLTCTFSGFSLSTAGVHVGWIRQPPGKALEWLALISWADDKRYRPSLRSRLDITRVTSKDQVVLSMTNMQPEDTATYYCALQGFDGYEANWGPGTLVTVSSGGGGSGGGGSGGGGSGGGGSDIVMTQSPSSLSASAGDRVTITCRASRGISSALAWYQQKPGKPPKLLIYDASSLESGVPSRFSGSGSGTDFTLTIDSLEPEDFATYYCQQSYSTPWTFGQGTKVDIKTTTPAPRPPTPAPTIASQPLSLRPEACRPAAGGAVHTRGLDFACDIYIWAPLAGTCGVLLLSLVITLYCKRGRKKLLYIFKQPFMRPVQTTQEEDGCSCRFPEEEEGGCELRVKFSRSADAPAYKQGQNQLYNELNLGRREEYDVLDKRRGRDPEMGGKPRRKNPQEGLYNELQKDKMAEAYSEIGMKGERRRGKGHDGLYQGLSTATKDTYDALHMQALPPR

SEQ ID NO: 749 - DNA, 1461 bp, Artificial Sequence
  source: /note="Description of Artificial Sequence: Synthetic polynucleotide"
atggccctccctgtcaccgccctgctgcttccgctggctcttctgctccacgccgctcggccccaagtgcaactcgtccaaagcggagcggaagtcaagaaacccggagcgagcgtgaaagtgtcctgcaaagcctccggctacacctttacgggctactacatgcactgggtgcgccaggcaccaggacagggtcttgaatggatgggatggatcaaccctaattcgggcggaactaactacgcacagaagttccaggggagagtgactctgactcgggatacctccatctcaactgtctacatggaactctcccgcttgcggtcagatgatacggcagtgtactactgcgcccgcgacatgaatatcctggctaccgtgccgttcgacatctggggacaggggactatggttactgtctcatcgggcggtggaggttcaggaggaggcggctcgggaggcggaggttcggacattcagatgacccagtccccatcctctctgtcggccagcgtcggagatagggtgaccattacctgtcgggcctcgcaaagcatctcctcgtacctcaactggtatcagcaaaagccgggaaaggcgcctaagctgctgatctacgccgcttcgagcttgcaaagcggggtgccatccagattctcgggatcaggctcaggaaccgacttcaccctgaccgtgaacagcctccagccggaggactttgccacttactactgccagcagggagactccgtgccgcttactttcggggggggtacccgcctggagatcaagaccactaccccagcaccgaggccacccaccccggctcctaccatcgcctcccagcctctgtccctgcgtccggaggcatgtagacccgcagctggtggggccgtgcatacccggggtcttgacttcgcctgcgatatctacatttgggcccctctggctggtacttgcggggtcctgctgctttcactcgtgatcactctttactgtaagcgcggtcggaagaagctgctgtacatctttaagcaacccttcatgaggcctgtgcagactactcaagaggaggacggctgttcatgccggttcccagaggaggaggaaggcggctgcgaactgcgcgtgaaattcagccgcagcgcagatgctccagcctacaagcaggggcagaaccagctctacaacgaactcaatcttggtcggagagaggagtacgacgtgctggacaagcggagaggacgggacccagaaatgggcgggaagccgcgcagaaagaatccccaagagggcctgtacaacgagctccaaaaggataagatggcagaagcctatagcgagattggtatgaaaggggaacgcagaagaggcaaaggccacgacggactgtaccagggactcagcaccgccaccaaggacacctatgacgctcttcacatgcaggccctgccgcctcgg

SEQ ID NO: 750 - protein, 487 aa, Artificial Sequence
  source: /note="Description of Artificial Sequence: Synthetic polypeptide"
MALPVTALLLPLALLLHAARPQVQLVQSGAEVKKPGASVKVSCKASGYTFTGYYMHWVRQAPGQGLEWMGWINPNSGGTNYAQKFQGRVTLTRDTSISTVYMELSRLRSDDTAVYYCARDMNILATVPFDIWGQGTMVTVSSGGGGSGGGGSGGGGSDIQMTQSPSSLSASVGDRVTITCRASQSISSYLNWYQQKPGKAPKLLIYAASSLQSGVPSRFSGSGSGTDFTLTVNSLQPEDFATYYCQQGDSVPLTFGGGTRLEIKTTTPAPRPPTPAPTIASQPLSLRPEACRPAAGGAVHTRGLDFACDIYIWAPLAGTCGVLLLSLVITLYCKRGRKKLLYIFKQPFMRPVQTTQEEDGCSCRFPEEEEGGCELRVKFSRSADAPAYKQGQNQLYNELNLGRREEYDVLDKRRGRDPEMGGKPRRKNPQEGLYNELQKDKMAEAYSEIGMKGERRRGKGHDGLYQGLSTATKDTYDALHMQALPPR

SEQ ID NO: 751 - protein, 264 aa, Artificial Sequence
  source: /note="Description of Artificial Sequence: Synthetic polypeptide"
MALPVTALLLPLALLLHAARPQVQLVQSGAEVKKPGASVKVSCKASGYTFTGYYMHWVRQAPGQGLEWMGWINPNSGGTNYAQKFQGRVTLTRDTSISTVYMELSRLRSDDTAVYYCARDMNILATVPFDIWGQGTMVTVSSGGGGSGGGGSGGGGSDIQMTQSPSSLSASVGDRVTITCRASQSISSYLNWYQQKPGKAPKLLIYAASSLQSGVPSRFSGSGSGTDFTLTVNSLQPEDFATYYCQQGDSVPLTFGGGTRLEIK

SEQ ID NO: 752 - protein, 121 aa, Artificial Sequence
  source: /note="Description of Artificial Sequence: Synthetic polypeptide"
QVQLVQSGAEVKKPGASVKVSCKASGYTFTGYYMHWVRQAPGQGLEWMGWINPNSGGTNYAQKFQGRVTLTRDTSISTVYMELSRLRSDDTAVYYCARDMNILATVPFDIWGQGTMVTVSS

SEQ ID NO: 753 - protein, 107 aa, Artificial Sequence
  source: /note="Description of Artificial Sequence: Synthetic polypeptide"
DIQMTQSPSSLSASVGDRVTITCRASQSISSYLNWYQQKPGKAPKLLIYAASSLQSGVPSRFSGSGSGTDFTLTVNSLQPEDFATYYCQQGDSVPLTFGGGTRLEIK

SEQ ID NO: 754 - DNA, 1461 bp, Artificial Sequence
  source: /note="Description of Artificial Sequence: Synthetic polynucleotide"
atggccctccctgtcaccgccctgctgcttccgctggctcttctgctccacgccgctcggccccaagtccaactcgttcaatccggcgcagaagtcaagaagccaggagcatcagtgaaagtgtcctgcaaagcctcaggctacatcttcacgggatactacatccactgggtgcgccaggctccgggccagggccttgagtggatgggctggatcaaccctaactctgggggaaccaactacgctcagaagttccaggggagggtcactatgactcgcgatacctccatctccactgcgtacatggaactctcgggactgagatccgacgatcctgccgtgtactactgcgcccgggacatgaacatcttggcgaccgtgccgtttgacatttggggacagggcaccctcgtcactgtgtcgagcggtggaggaggctcggggggtggcggatcaggagggggaggaagcgacatccagctgactcagagcccatcgtcgttgtccgcgtcggtgggggatagagtgaccattacttgccgcgccagccagagcatctcatcatatctgaattggtaccagcagaagcccggaaaggccccaaaactgctgatctacgctgcaagcagcctccaatcgggagtgccgtcacggttctccgggtccggttcgggaactgactttaccctgaccgtgaattcgctgcaaccggaggatttcgccacgtactactgtcagcaaggagactccgtgccgctgaccttcggtggaggcaccaaggtcgaaatcaagaccactaccccagcaccgaggccacccaccccggctcctaccatcgcctcccagcctctgtccctgcgtccggaggcatgtagacccgcagctggtggggccgtgcatacccggggtcttgacttcgcctgcgatatctacatttgggcccctctggctggtacttgcggggtcctgctgctttcactcgtgatcactctttactgtaagcgcggtcggaagaagctgctgtacatctttaagcaacccttcatgaggcctgtgcagactactcaagaggaggacggctgttcatgccggttcccagaggaggaggaaggcggctgcgaactgcgcgtgaaattcagccgcagcgcagatgctccagcctacaagcaggggcagaaccagctctacaacgaactcaatcttggtcggagagaggagtacgacgtgctggacaagcggagaggacgggacccagaaatgggcgggaagccgcgcagaaagaatccccaagagggcctgtacaacgagctccaaaaggataagatggcagaagcctatagcgagattggtatgaaaggggaacgcagaagaggcaaaggccacgacggactgtaccagggactcagcaccgccaccaaggacacctatgacgctcttcacatgcaggccctgccgcctcgg

SEQ ID NO: 755 - protein, 487 aa, Artificial Sequence
  source: /note="Description of Artificial Sequence: Synthetic polypeptide"
MALPVTALLLPLALLLHAARPQVQLVQSGAEVKKPGASVKVSCKASGYIFTGYYIHWVRQAPGQGLEWMGWINPNSGGTNYAQKFQGRVTMTRDTSISTAYMELSGLRSDDPAVYYCARDMNILATVPFDIWGQGTLVTVSSGGGGSGGGGSGGGGSDIQLTQSPSSLSASVGDRVTITCRASQSISSYLNWYQQKPGKAPKLLIYAASSLQSGVPSRFSGSGSGTDFTLTVNSLQPEDFATYYCQQGDSVPLTFGGGTKVEIKTTTPAPRPPTPAPTIASQPLSLRPEACRPAAGGAVHTRGLDFACDIYIWAPLAGTCGVLLLSLVITLYCKRGRKKLLYIFKQPFMRPVQTTQEEDGCSCRFPEEEEGGCELRVKFSRSADAPAYKQGQNQLYNELNLGRREEYDVLDKRRGRDPEMGGKPRRKNPQEGLYNELQKDKMAEAYSEIGMKGERRRGKGHDGLYQGLSTATKDTYDALHMQALPPR

SEQ ID NO: 756 - protein, 264 aa, Artificial Sequence
  source: /note="Description of Artificial Sequence: Synthetic polypeptide"
MALPVTALLLPLALLLHAARPQVQLVQSGAEVKKPGASVKVSCKASGYIFTGYYIHWVRQAPGQGLEWMGWINPNSGGTNYAQKFQGRVTMTRDTSISTAYMELSGLRSDDPAVYYCARDMNILATVPFDIWGQGTLVTVSSGGGGSGGGGSGGGGSDIQLTQSPSSLSASVGDRVTITCRASQSISSYLNWYQQKPGKAPKLLIYAASSLQSGVPSRFSGSGSGTDFTLTVNSLQPEDFATYYCQQGDSVPLTFGGGTKVEIK

SEQ ID NO: 757 - protein, 121 aa, Artificial Sequence
  source: /note="Description of Artificial Sequence: Synthetic polypeptide"
QVQLVQSGAEVKKPGASVKVSCKASGYIFTGYYIHWVRQAPGQGLEWMGWINPNSGGTNYAQKFQGRVTMTRDTSISTAYMELSGLRSDDPAVYYCARDMNILATVPFDIWGQGTLVTVSS

SEQ ID NO: 758 - protein, 107 aa, Artificial Sequence
  source: /note="Description of Artificial Sequence: Synthetic polypeptide"
DIQLTQSPSSLSASVGDRVTITCRASQSISSYLNWYQQKPGKAPKLLIYAASSLQSGVPSRFSGSGSGTDFTLTVNSLQPEDFATYYCQQGDSVPLTFGGGTKVEIK

SEQ ID NO: 759 - DNA, 1467 bp, Artificial Sequence
  source: /note="Description of Artificial Sequence: Synthetic polynucleotide"
atggccctccctgtcaccgccctgctgcttccgctggctcttctgctccacgccgctcggccccaagtccaactccaacagtcaggcgcagaagtgaaaaagagcggtgcatcggtgaaagtgtcatgcaaagcctcgggctacaccttcactgactactatatgcactggctgcggcaggcaccgggacagggacttgagtggatgggatggatcaacccgaattcaggggacactaactacgcgcagaagttccaggggagagtgaccctgacgagggacacctcaatttcgaccgtctacatggaattgtcgcgcctgagatcggacgatactgctgtgtactactgtgcccgcgacatgaacatcctcgcgactgtgccttttgatatctggggacaggggactatggtcaccgtttcctccgcttccggtggcggaggctcgggaggccgggcctccggtggaggaggcagcgacatccagatgactcagagcccttcctcgctgagcgcctcagtgggagatcgcgtgaccatcacttgccgggccagccagtccatttcgtcctacctcaattggtaccagcagaagccgggaaaggcgcccaagctcttgatctacgctgcgagctccctgcaaagcggggtgccgagccgattctcgggttccggctcgggaaccgacttcactctgaccatctcatccctgcaaccagaggactttgccacctactactgccaacaaggagattctgtcccactgacgttcggcggaggaaccaaggtcgaaatcaagaccactaccccagcaccgaggccacccaccccggctcctaccatcgcctcccagcctctgtccctgcgtccggaggcatgtagacccgcagctggtggggccgtgcatacccggggtcttgacttcgcctgcgatatctacatttgggcccctctggctggtacttgcggggtcctgctgctttcactcgtgatcactctttactgtaagcgcggtcggaagaagctgctgtacatctttaagcaacccttcatgaggcctgtgcagactactcaagaggaggacggctgttcatgccggttcccagaggaggaggaaggcggctgcgaactgcgcgtgaaattcagccgcagcgcagatgctccagcctacaagcaggggcagaaccagctctacaacgaactcaatcttggtcggagagaggagtacgacgtgctggacaagcggagaggacgggacccagaaatgggcgggaagccgcgcagaaagaatccccaagagggcctgtacaacgagctccaaaaggataagatggcagaagcctatagcgagattggtatgaaaggggaacgcagaagaggcaaaggccacgacggactgtaccagggactcagcaccgccaccaaggacacctatgacgctcttcacatgcaggccctgccgcctcgg

SEQ ID NO: 760 - protein, 336 aa, Artificial Sequence
  source: /note="Description of Artificial Sequence: Synthetic polypeptide"
MALPVTALLLPLALLLHAARPQVQLQQSGAEVKKSGASVKVSCKASGYTFTDYYMHWLRQAPGQGLEWMGWINPNSGDTNYAQKFQGRVTLTRDTSISTVYMELSRLRSDDTAVYYCARDMNILATVPFDIWGQGTMVTVSSASGGGGSGGRASGGGGSDIQMTQSPSSLSASVGDRVTITCRASQSISSYLNWYQQKPGKAPKLLIYAASSLQSGVPSRFSGSGSGTDFTLTISSLQPEDFATYYCQQGDSVPLTFGGGTKVEIKTTTPAPRPPTPAPTIASQPLSLRPEACRPAAGGAVHTRGLDFACDIYIWAPLAGTCGVLLLSLVITLYCK

SEQ ID NO: 761 - protein, 266 aa, Artificial Sequence
  source: /note="Description of Artificial Sequence: Synthetic polypeptide"
MALPVTALLLPLALLLHAARPQVQLQQSGAEVKKSGASVKVSCKASGYTFTDYYMHWLRQAPGQGLEWMGWINPNSGDTNYAQKFQGRVTLTRDTSISTVYMELSRLRSDDTAVYYCARDMNILATVPFDIWGQGTMVTVSSASGGGGSGGRASGGGGSDIQMTQSPSSLSASVGDRVTITCRASQSISSYLNWYQQKPGKAPKLLIYAASSLQSGVPSRFSGSGSGTDFTLTISSLQPEDFATYYCQQGDSVPLTFGGGTKVEIK

SEQ ID NO: 762 - protein, 121 aa, Artificial Sequence
  source: /note="Description of Artificial Sequence: Synthetic polypeptide"
QVQLQQSGAEVKKSGASVKVSCKASGYTFTDYYMHWLRQAPGQGLEWMGWINPNSGDTNYAQKFQGRVTLTRDTSISTVYMELSRLRSDDTAVYYCARDMNILATVPFDIWGQGTMVTVSS

SEQ ID NO: 763 - protein, 107 aa, Artificial Sequence
  source: /note="Description of Artificial Sequence: Synthetic polypeptide"
DIQMTQSPSSLSASVGDRVTITCRASQSISSYLNWYQQKPGKAPKLLIYAASSLQSGVPSRFSGSGSGTDFTLTISSLQPEDFATYYCQQGDSVPLTFGGGTKVEIK

SEQ ID NO: 764 - DNA, 1461 bp, Artificial Sequence
  source: /note="Description of Artificial Sequence: Synthetic polynucleotide"
atggccctccctgtcaccgccctgctgcttccgctggctcttctgctccacgccgctcggccccaagtccaactcgtccagtcaggagcggaagtcaagaagcccggagcgtcagtcaaagtgtcatgcaaagcctcgggctacactttcactgggtactacatgcactgggtgcgccaggctccaggacagggactggaatggatgggatggatcaacccgaactccggtggcaccaattacgcccagaagttccaggggagggtgaccatgactcgcgacacgtcgatcagcaccgcatacatggagctgtcaagactccggtccgacgatactgccgtgtactactgcgcacgggacatgaacattctggccaccgtgccttttgacatctggggtcagggaactatggttaccgtgtcctctggtggaggcggctccggcggggggggaagcggaggcggtggaagcgacattcagatgacccagtcgccttcatccctttcggcgagcgtgggagatcgcgtcactatcacttgtcgggcctcgcagtccatctccacctacctcaattggtaccagcagaagccaggaaaagcaccgaatctgctgatctacgccgcgttttccttgcaatcgggagtgccaagcagattcagcggatcgggatcaggcactgatttcaccctcaccatcaactcgctgcaaccggaggatttcgctacgtactattgccaacaaggagacagcgtgccgctcaccttcggcggagggactaagctggaaatcaagaccactaccccagcaccgaggccacccaccccggctcctaccatcgcctcccagcctctgtccctgcgtccggaggcatgtagacccgcagctggtggggccgtgcatacccggggtcttgacttcgcctgcgatatctacatttgggcccctctggctggtacttgcggggtcctgctgctttcactcgtgatcactctttactgtaagcgcggtcggaagaagctgctgtacatctttaagcaacccttcatgaggcctgtgcagactactcaagaggaggacggctgttcatgccggttcccagaggaggaggaaggcggctgcgaactgcgcgtgaaattcagccgcagcgcagatgctccagcctacaagcaggggcagaaccagctctacaacgaactcaatcttggtcggagagaggagtacgacgtgctggacaagcggagaggacgggacccagaaatgggcgggaagccgcgcagaaagaatccccaagagggcctgtacaacgagctccaaaaggataagatggcagaagcctatagcgagattggtatgaaaggggaacgcagaagaggcaaaggccacgacggactgtaccagggactcagcaccgccaccaaggacacctatgacgctcttcacatgcaggccctgccgcctcgg

SEQ ID NO: 765 - protein, 487 aa, Artificial Sequence
  source: /note="Description of Artificial Sequence: Synthetic polypeptide"
MALPVTALLLPLALLLHAARPQVQLVQSGAEVKKPGASVKVSCKASGYTFTGYYMHWVRQAPGQGLEWMGWINPNSGGTNYAQKFQGRVTMTRDTSISTAYMELSRLRSDDTAVYYCARDMNILATVPFDIWGQGTMVTVSSGGGGSGGGGSGGGGSDIQMTQSPSSLSASVGDRVTITCRASQSISTYLNWYQQKPGKAPNLLIYAAFSLQSGVPSRFSGSGSGTDFTLTINSLQPEDFATYYCQQGDSVPLTFGGGTKLEIKTTTPAPRPPTPAPTIASQPLSLRPEACRPAAGGAVHTRGLDFACDIYIWAPLAGTCGVLLLSLVITLYCKRGRKKLLYIFKQPFMRPVQTTQEEDGCSCRFPEEEEGGCELRVKFSRSADAPAYKQGQNQLYNELNLGRREEYDVLDKRRGRDPEMGGKPRRKNPQEGLYNELQKDKMAEAYSEIGMKGERRRGKGHDGLYQGLSTATKDTYDALHMQALPPR

SEQ ID NO: 766 - protein, 264 aa, Artificial Sequence
  source: /note="Description of Artificial Sequence: Synthetic polypeptide"
MALPVTALLLPLALLLHAARPQVQLVQSGAEVKKPGASVKVSCKASGYTFTGYYMHWVRQAPGQGLEWMGWINPNSGGTNYAQKFQGRVTMTRDTSISTAYMELSRLRSDDTAVYYCARDMNILATVPFDIWGQGTMVTVSSGGGGSGGGGSGGGGSDIQMTQSPSSLSASVGDRVTITCRASQSISTYLNWYQQKPGKAPNLLIYAAFSLQSGVPSRFSGSGSGTDFTLTINSLQPEDFATYYCQQGDSVPLTFGGGTKLEIK

SEQ ID NO: 767 - protein, 121 aa, Artificial Sequence
  source: /note="Description of Artificial Sequence: Synthetic polypeptide"
QVQLVQSGAEVKKPGASVKVSCKASGYTFTGYYMHWVRQAPGQGLEWMGWINPNSGGTNYAQKFQGRVTMTRDTSISTAYMELSRLRSDDTAVYYCARDMNILATVPFDIWGQGTMVTVSS

SEQ ID NO: 768 - protein, 107 aa, Artificial Sequence
  source: /note="Description of Artificial Sequence: Synthetic polypeptide"
DIQMTQSPSSLSASVGDRVTITCRASQSISTYLNWYQQKPGKAPNLLIYAAFSLQSGVPSRFSGSGSGTDFTLTINSLQPEDFATYYCQQGDSVPLTFGGGTKLEIK

SEQ ID NO: 769 - DNA, 1470 bp, Artificial Sequence
  source: /note="Description of Artificial Sequence: Synthetic polynucleotide"
atggccctccctgtcaccgccctgctgcttccgctggctcttctgctccacgccgctcggcccgagatccagctggtgcagtcgggagctgaagtcaaaaagcctggcgcaaccgtcaagatctcgtgcaaaggatcagggttcaacatcgaggactactacatccattgggtgcaacaggcacccggaaaaggcctggagtggatggggaggattgacccagaaaatgacgaaaccaagtacggaccgatcttccaaggacgggtgaccatcacggctgacacttccactaacaccgtctacatggaactctcgagccttcgctcggaagataccgcggtgtactactgcgcctttagaggtggagtctactggggacaagggactaccgtcaccgtgtcgtcaggtggcggaggatcaggcggaggcggctccggtggaggaggaagcggaggaggtggctccgacgtggtgatgacgcagtcaccggactccttggcggtgagcctgggtgaacgcgccactatcaactgcaagagctcccagagcttgctggactccgatggaaagacttatctcaattggctgcaacagaagcctggccagccgccaaagagactcatctcactggtgagcaagctggatagcggagtgccagatcggttttcgggatcgggctcaggcaccgacttcaccctgactatttcctccctccaagccgaggatgtggccgtctactactgttggcaggggactcacttcccggggaccttcggtggaggcactaaggtggagatcaaaaccactaccccagcaccgaggccacccaccccggctcctaccatcgcctcccagcctctgtccctgcgtccggaggcatgtagacccgcagctggtggggccgtgcatacccggggtcttgacttcgcctgcgatatctacatttgggcccctctggctggtacttgcggggtcctgctgctttcactcgtgatcactctttactgtaagcgcggtcggaagaagctgctgtacatctttaagcaacccttcatgaggcctgtgcagactactcaagaggaggacggctgttcatgccggttcccagaggaggaggaaggcggctgcgaactgcgcgtgaaattcagccgcagcgcagatgctccagcctacaagcaggggcagaaccagctctacaacgaactcaatcttggtcggagagaggagtacgacgtgctggacaagcggagaggacgggacccagaaatgggcgggaagccgcgcagaaagaatccccaagagggcctgtacaacgagctccaaaaggataagatggcagaagcctatagcgagattggtatgaaaggggaacgcagaagaggcaaaggccacgacggactgtaccagggactcagcaccgccaccaaggacacctatgacgctcttcacatgcaggccctgccgcctcgg

SEQ ID NO: 770 - protein, 490 aa, Artificial Sequence
  source: /note="Description of Artificial Sequence: Synthetic polypeptide"
MALPVTALLLPLALLLHAARPEIQLVQSGAEVKKPGATVKISCKGSGFNIEDYYIHWVQQAPGKGLEWMGRIDPENDETKYGPIFQGRVTITADTSTNTVYMELSSLRSEDTAVYYCAFRGGVYWGQGTTVTVSSGGGGSGGGGSGGGGSGGGGSDVVMTQSPDSLAVSLGERATINCKSSQSLLDSDGKTYLNWLQQKPGQPPKRLISLVSKLDSGVPDRFSGSGSGTDFTLTISSLQAEDVAVYYCWQGTHFPGTFGGGTKVEIKTTTPAPRPPTPAPTIASQPLSLRPEACRPAAGGAVHTRGLDFACDIYIWAPLAGTCGVLLLSLVITLYCKRGRKKLLYIFKQPFMRPVQTTQEEDGCSCRFPEEEEGGCELRVKFSRSADAPAYKQGQNQLYNELNLGRREEYDVLDKRRGRDPEMGGKPRRKNPQEGLYNELQKDKMAEAYSEIGMKGERRRGKGHDGLYQGLSTATKDTYDALHMQALPPR

SEQ ID NO: 771 - DNA, 1470 bp, Artificial Sequence
  source: /note="Description of Artificial Sequence: Synthetic polynucleotide"
atggccctccctgtcaccgccctgctgcttccgctggctcttctgctccacgccgctcggcccgacgtggtcatgactcaaagcccagattccttggctgtctcccttggagaaagagcaacgatcaattgcaaaagctcgcagtccctgttggactccgatggaaaaacctacctcaactggctgcagcagaagccgggacaaccaccaaagcggctgatttccctcgtgtccaagctggacagcggcgtgccggatcgcttctcgggcagcggctcgggaaccgattttactctcactatttcgtcactgcaagcggaggacgtggcggtgtattactgctggcagggcactcacttcccgggtacttttggtggaggtaccaaagtcgaaatcaagggtggaggcgggagcggaggaggcgggtcgggaggaggaggatcgggtggcggaggctcagaaatccagctggtgcagtcaggtgccgaagtgaagaagcctggggccacggtgaagatctcgtgcaaggggagcggattcaacatcgaggattactacatccattgggtgcaacaggcccctggcaaagggctggaatggatgggaaggatcgaccccgagaatgacgagactaagtacggcccgatcttccaaggacgggtgaccatcactgcagacacttcaaccaacaccgtctacatggaactctcctcgctgcgctccgaggacaccgccgtgtactactgtgctttcagaggaggagtctactggggacagggaacgaccgtgaccgtcagctcaaccactaccccagcaccgaggccacccaccccggctcctaccatcgcctcccagcctctgtccctgcgtccggaggcatgtagacccgcagctggtggggccgtgcatacccggggtcttgacttcgcctgcgatatctacatttgggcccctctggctggtacttgcggggtcctgctgctttcactcgtgatcactctttactgtaagcgcggtcggaagaagctgctgtacatctttaagcaacccttcatgaggcctgtgcagactactcaagaggaggacggctgttcatgccggttcccagaggaggaggaaggcggctgcgaactgcgcgtgaaattcagccgcagcgcagatgctccagcctacaagcaggggcagaaccagctctacaacgaactcaatcttggtcggagagaggagtacgacgtgctggacaagcggagaggacgggacccagaaatgggcgggaagccgcgcagaaagaatccccaagagggcctgtacaacgagctccaaaaggataagatggcagaagcctatagcgagattggtatgaaaggggaacgcagaagaggcaaaggccacgacggactgtaccagggactcagcaccgccaccaaggacacctatgacgctcttcacatgcaggccctgccgcctcgg

SEQ ID NO: 772 - protein, 490 aa, Artificial Sequence
  source: /note="Description of Artificial Sequence: Synthetic polypeptide"
MALPVTALLLPLALLLHAARPDVVMTQSPDSLAVSLGERATINCKSSQSLLDSDGKTYLNWLQQKPGQPPKRLISLVSKLDSGVPDRFSGSGSGTDFTLTISSLQAEDVAVYYCWQGTHFPGTFGGGTKVEIKGGGGSGGGGSGGGGSGGGGSEIQLVQSGAEVKKPGATVKISCKGSGFNIEDYYIHWVQQAPGKGLEWMGRIDPENDETKYGPIFQGRVTITADTSTNTVYMELSSLRSEDTAVYYCAFRGGVYWGQGTTVTVSSTTTPAPRPPTPAPTIASQPLSLRPEACRPAAGGAVHTRGLDFACDIYIWAPLAGTCGVLLLSLVITLYCKRGRKKLLYIFKQPFMRPVQTTQEEDGCSCRFPEEEEGGCELRVKFSRSADAPAYKQGQNQLYNELNLGRREEYDVLDKRRGRDPEMGGKPRRKNPQEGLYNELQKDKMAEAYSEIGMKGERRRGKGHDGLYQGLSTATKDTYDALHMQALPPR

SEQ ID NO: 773 - DNA, 1470 bp, Artificial Sequence
  source: /note="Description of Artificial Sequence: Synthetic polynucleotide"
atggccctccctgtcaccgccctgctgcttccgctggctcttctgctccacgccgctcggcccgaaatccagctggtgcaaagcggagccgaggtgaagaagcccggagaatccctgcgcatctcgtgtaagggttccggctttaacatcgaggattactacatccactgggtgagacagatgccgggcaaaggtctggaatggatgggccgcatcgacccggagaacgacgaaaccaaatacggaccaatcttccaaggacatgtgactatttccgcggatacctccatcaacactgtctacttgcagtggagctcgctcaaggcgtcggataccgccatgtactactgcgcattcagaggaggtgtgtactggggccagggcactacggtcaccgtgtcctcgggaggtggagggtcaggaggcggaggctcgggcggtggaggatcaggcggaggaggaagcgatgtggtcatgactcaatccccactgtcactgcctgtcactctggggcaaccggcttccatctcatgcaagtcaagccaatcgctgctcgactccgacggaaaaacctacctcaattggcttcagcagcgcccaggccagtcgcctcggaggctgatctcactcgtgtcgaagcttgactccggggtgccggatcggtttagcggaagcggatcggggaccgacttcacgttgaagattagccgggtggaagccgaggacgtgggagtctattactgctggcaggggacccacttcccggggactttcggaggaggcaccaaagtcgagattaagaccactaccccagcaccgaggccacccaccccggctcctaccatcgcctcccagcctctgtccctgcgtccggaggcatgtagacccgcagctggtggggccgtgcatacccggggtcttgacttcgcctgcgatatctacatttgggcccctctggctggtacttgcggggtcctgctgctttcactcgtgatcactctttactgtaagcgcggtcggaagaagctgctgtacatctttaagcaacccttcatgaggcctgtgcagactactcaagaggaggacggctgttcatgccggttcccagaggaggaggaaggcggctgcgaactgcgcgtgaaattcagccgcagcgcagatgctccagcctacaagcaggggcagaaccagctctacaacgaactcaatcttggtcggagagaggagtacgacgtgctggacaagcggagaggacgggacccagaaatgggcgggaagccgcgcagaaagaatccccaagagggcctgtacaacgagctccaaaaggataagatggcagaagcctatagcgagattggtatgaaaggggaacgcagaagaggcaaaggccacgacggactgtaccagggactcagcaccgccaccaaggacacctatgacgctcttcacatgcaggccctgccgcctcgg

SEQ ID NO: 774 - protein, 490 aa, Artificial Sequence
  source: /note="Description of Artificial Sequence: Synthetic polypeptide"
MALPVTALLLPLALLLHAARPEIQLVQSGAEVKKPGESLRISCKGSGFNIEDYYIHWVRQMPGKGLEWMGRIDPENDETKYGPIFQGHVTISADTSINTVYLQWSSLKASDTAMYYCAFRGGVYWGQGTTVTVSSGGGGSGGGGSGGGGSGGGGSDVVMTQSPLSLPVTLGQPASISCKSSQSLLDSDGKTYLNWLQQRPGQSPRRLISLVSKLDSGVPDRFSGSGSGTDFTLKISRVEAEDVGVYYCWQGTHFPGTFGGGTKVEIKTTTPAPRPPTPAPTIASQPLSLRPEACRPAAGGAVHTRGLDFACDIYIWAPLAGTCGVLLLSLVITLYCKRGRKKLLYIFKQPFMRPVQTTQEEDGCSCRFPEEEEGGCELRVKFSRSADAPAYKQGQNQLYNELNLGRREEYDVLDKRRGRDPEMGGKPRRKNPQEGLYNELQKDKMAEAYSEIGMKGERRRGKGHDGLYQGLSTATKDTYDALHMQALPPR

SEQ ID NO: 775 - DNA, 1470 bp, Artificial Sequence
  source: /note="Description of Artificial Sequence: Synthetic polynucleotide"
atggccctccctgtcaccgccctgctgcttccgctggctcttctgctccacgccgctcggcccgacgtcgtcatgacccaatcccctctctccctgccggtcaccctgggtcagccggcgtcgatctcatgcaaaagctcacagtccctgctggattcggacggaaaaacctacttgaactggctccaacagaggccgggtcagtcccctcgcagactgatctcgctggtgagcaagctcgactcgggtgtgccggatcggttctccgggtcaggatcgggcaccgactttacgctcaagatttcgagagtggaggccgaggatgtgggagtgtactattgctggcagggcacgcatttccccgggacctttggaggcgggactaaggtggaaatcaagggaggtggcggatcaggcggaggaggcagcggcggaggtggatcaggaggcggagggtcagagatccagctggtccaaagcggagcagaggtgaagaagccaggcgagtcccttcgcatttcgtgcaaagggagcggcttcaacattgaagattactacatccactgggtgcggcaaatgccaggaaagggtctggaatggatgggacggatcgacccagaaaatgatgaaactaagtacggaccgatcttccaaggacacgtcactatctccgcggacacttcgatcaacaccgtgtacctccagtggagcagcttgaaagcctccgacaccgctatgtactactgtgccttccgcggaggagtctactggggacaggggactactgtgaccgtgtcgtccaccactaccccagcaccgaggccacccaccccggctcctaccatcgcctcccagcctctgtccctgcgtccggaggcatgtagacccgcagctggtggggccgtgcatacccggggtcttgacttcgcctgcgatatctacatttgggcccctctggctggtacttgcggggtcctgctgctttcactcgtgatcactctttactgtaagcgcggtcggaagaagctgctgtacatctttaagcaacccttcatgaggcctgtgcagactactcaagaggaggacggctgttcatgccggttcccagaggaggaggaaggcggctgcgaactgcgcgtgaaattcagccgcagcgcagatgctccagcctacaagcaggggcagaaccagctctacaacgaactcaatcttggtcggagagaggagtacgacgtgctggacaagcggagaggacgggacccagaaatgggcgggaagccgcgcagaaagaatccccaagagggcctgtacaacgagctccaaaaggataagatggcagaagcctatagcgagattggtatgaaaggggaacgcagaagaggcaaaggccacgacggactgtaccagggactcagcaccgccaccaaggacacctatgacgctcttcacatgcaggccctgccgcctcgg

SEQ ID NO: 776 - protein, 490 aa, Artificial Sequence
  source: /note="Description of Artificial Sequence: Synthetic polypeptide"
MALPVTALLLPLALLLHAARPDVVMTQSPLSLPVTLGQPASISCKSSQSLLDSDGKTYLNWLQQRPGQSPRRLISLVSKLDSGVPDRFSGSGSGTDFTLKISRVEAEDVGVYYCWQGTHFPGTFGGGTKVEIKGGGGSGGGGSGGGGSGGGGSEIQLVQSGAEVKKPGESLRISCKGSGFNIEDYYIHWVRQMPGKGLEWMGRIDPENDETKYGPIFQGHVTISADTSINTVYLQWSSLKASDTAMYYCAFRGGVYWGQGTTVTVSSTTTPAPRPPTPAPTIASQPLSLRPEACRPAAGGAVHTRGLDFACDIYIWAPLAGTCGVLLLSLVITLYCKRGRKKLLYIFKQPFMRPVQTTQEEDGCSCRFPEEEEGGCELRVKFSRSADAPAYKQGQNQLYNELNLGRREEYDVLDKRRGRDPEMGGKPRRKNPQEGLYNELQKDKMAEAYSEIGMKGERRRGKGHDGLYQGLSTATKDTYDALHMQALPPR

SEQ ID NO: 777 - DNA, 1470 bp, Artificial Sequence
  source: /note="Description of Artificial Sequence: Synthetic polynucleotide"
atggccctccctgtcaccgccctgctgcttccgctggctcttctgctccacgccgctcggcccgaaatccagctcgtgcagagcggagccgaggtcaagaaaccgggtgctaccgtgaagatttcatgcaagggatcgggcttcaacatcgaggattactacatccactgggtgcagcaggcaccaggaaaaggacttgaatggatgggccggatcgacccggaaaatgacgagactaagtacggccctatcttccaaggacgggtgacgatcaccgcagacactagcaccaacaccgtctatatggaactctcgtccctgaggtccgaagatactgccgtgtactactgtgcgtttcgcggaggtgtgtactggggacagggtaccaccgtcaccgtgtcatcgggcggtggaggctccggtggaggagggtcaggaggcggtggaagcggaggaggcggcagcgacgtggtcatgactcaatcgccgctgtcgctgcccgtcactctgggacaacccgcgtccatcagctgcaaatcctcgcagtcactgcttgactccgatggaaagacctacctcaactggctgcagcaacgcccaggccaatccccaagacgcctgatctcgttggtgtcaaagctggactcaggggtgccggaccggttctccgggagcgggtcgggcacggatttcactctcaagatctccagagtggaagccgaggatgtgggagtctactactgctggcagggaacccatttccctggaacttttggcggaggaactaaggtcgagattaaaaccactaccccagcaccgaggccacccaccccggctcctaccatcgcctcccagcctctgtccctgcgtccggaggcatgtagacccgcagctggtggggccgtgcatacccggggtcttgacttcgcctgcgatatctacatttgggcccctctggctggtacttgcggggtcctgctgctttcactcgtgatcactctttactgtaagcgcggtcggaagaagctgctgtacatctttaagcaacccttcatgaggcctgtgcagactactcaagaggaggacggctgttcatgccggttcccagaggaggaggaaggcggctgcgaactgcgcgtgaaattcagccgcagcgcagatgctccagcctacaagcaggggcagaaccagctctacaacgaactcaatcttggtcggagagaggagtacgacgtgctggacaagcggagaggacgggacccagaaatgggcgggaagccgcgcagaaagaatccccaagagggcctgtacaacgagctccaaaaggataagatggcagaagcctatagcgagattggtatgaaaggggaacgcagaagaggcaaaggccacgacggactgtaccagggactcagcaccgccaccaaggacacctatgacgctcttcacatgcaggccctgccgcctcgg

SEQ ID NO: 778 - protein, 490 aa, Artificial Sequence
  source: /note="Description of Artificial Sequence: Synthetic polypeptide"
MALPVTALLLPLALLLHAARPEIQLVQSGAEVKKPGATVKISCKGSGFNIEDYYIHWVQQAPGKGLEWMGRIDPENDETKYGPIFQGRVTITADTSTNTVYMELSSLRSEDTAVYYCAFRGGVYWGQGTTVTVSSGGGGSGGGGSGGGGSGGGGSDVVMTQSPLSLPVTLGQPASISCKSSQSLLDSDGKTYLNWLQQRPGQSPRRLISLVSKLDSGVPDRFSGSGSGTDFTLKISRVEAEDVGVYYCWQGTHFPGTFGGGTKVEIKTTTPAPRPPTPAPTIASQPLSLRPEACRPAAGGAVHTRGLDFACDIYIWAPLAGTCGVLLLSLVITLYCKRGRKKLLYIFKQPFMRPVQTTQEEDGCSCRFPEEEEGGCELRVKFSRSADAPAYKQGQNQLYNELNLGRREEYDVLDKRRGRDPEMGGKPRRKNPQEGLYNELQKDKMAEAYSEIGMKGERRRGKGHDGLYQGLSTATKDTYDALHMQALPPR

SEQ ID NO: 779 - DNA, 1470 bp, Artificial Sequence
  source: /note="Description of Artificial Sequence: Synthetic polynucleotide"
atggccctccctgtcaccgccctgctgcttccgctggctcttctgctccacgccgctcggcccgagattcagctcgtgcaatcgggagcggaagtcaagaagccaggagagtccttgcggatctcatgcaagggtagcggctttaacatcgaggattactacatccactgggtgaggcagatgccggggaagggactcgaatggatgggacggatcgacccagaaaacgacgaaactaagtacggtccgatcttccaaggccatgtgactattagcgccgatacttcaatcaataccgtgtatctgcaatggtcctcattgaaagcctcagataccgcgatgtactactgtgctttcagaggaggggtctactggggacagggaactaccgtgactgtctcgtccggcggaggcgggtcaggaggtggcggcagcggaggaggagggtccggcggaggtgggtccgacgtcgtgatgacccagagccctgacagcctggcagtgagcctgggcgaaagagctaccattaactgcaaatcgtcgcagagcctgctggactcggacggaaaaacgtacctcaattggctgcagcaaaagcctggccagccaccgaagcgccttatctcactggtgtcgaagctggattcgggagtgcccgatcgcttctccggctcgggatcgggtactgacttcaccctcactatctcctcgcttcaagcagaggacgtggccgtctactactgctggcagggaacccactttccgggaaccttcggcggagggacgaaagtggagatcaagaccactaccccagcaccgaggccacccaccccggctcctaccatcgcctcccagcctctgtccctgcgtccggaggcatgtagacccgcagctggtggggccgtgcatacccggggtcttgacttcgcctgcgatatctacatttgggcccctctggctggtacttgcggggtcctgctgctttcactcgtgatcactctttactgtaagcgcggtcggaagaagctgctgtacatctttaagcaacccttcatgaggcctgtgcagactactcaagaggaggacggctgttcatgccggttcccagaggaggaggaaggcggctgcgaactgcgcgtgaaattcagccgcagcgcagatgctccagcctacaagcaggggcagaaccagctctacaacgaactcaatcttggtcggagagaggagtacgacgtgctggacaagcggagaggacgggacccagaaatgggcgggaagccgcgcagaaagaatccccaagagggcctgtacaacgagctccaaaaggataagatggcagaagcctatagcgagattggtatgaaaggggaacgcagaagaggcaaaggccacgacggactgtaccagggactcagcaccgccaccaaggacacctatgacgctcttcacatgcaggccctgccgcctcgg

SEQ ID NO: 780 - protein, 490 aa, Artificial Sequence
  source: /note="Description of Artificial Sequence: Synthetic polypeptide"
MALPVTALLLPLALLLHAARPEIQLVQSGAEVKKPGESLRISCKGSGFNIEDYYIHWVRQMPGKGLEWMGRIDPENDETKYGPIFQGHVTISADTSINTVYLQWSSLKASDTAMYYCAFRGGVYWGQGTTVTVSSGGGGSGGGGSGGGGSGGGGSDVVMTQSPDSLAVSLGERATINCKSSQSLLDSDGKTYLNWLQQKPGQPPKRLISLVSKLDSGVPDRFSGSGSGTDFTLTISSLQAEDVAVYYCWQGTHFPGTFGGGTKVEIKTTTPAPRPPTPAPTIASQPLSLRPEACRPAAGGAVHTRGLDFACDIYIWAPLAGTCGVLLLSLVITLYCKRGRKKLLYIFKQPFMRPVQTTQEEDGCSCRFPEEEEGGCELRVKFSRSADAPAYKQGQNQLYNELNLGRREEYDVLDKRRGRDPEMGGKPRRKNPQEGLYNELQKDKMAEAYSEIGMKGERRRGKGHDGLYQGLSTATKDTYDALHMQALPPR

SEQ ID NO: 781 - DNA, 1470 bp, Artificial Sequence
  source: /note="Description of Artificial Sequence: Synthetic polynucleotide"
atggccctccctgtcaccgccctgctgcttccgctggctcttctgctccacgccgctcggcccgacgtggtgatgactcagtcgcctgactcgctggctgtgtcccttggagagcgggccactatcaattgcaagtcatcccagtcgctgctggattccgacgggaaaacctacctcaattggctgcagcaaaaaccgggacagcctccaaagcggctcatcagcctggtgtccaagttggacagcggcgtgccagaccgcttctccggttcgggaagcggtactgatttcacgctgaccatctcatccctccaagcggaggatgtggcagtctactactgttggcagggcacgcattttccgggcacttttggaggagggaccaaggtcgaaatcaagggaggaggtggctcgggcggaggaggctcgggaggaggaggatcaggaggcggtggaagcgagattcaactggtccagagcggcgcagaagtcaagaagccgggtgaatcgctcagaatctcgtgcaaaggatcgggattcaacatcgaggactactacattcactgggtcagacaaatgccgggcaaagggctggaatggatggggaggatcgaccccgaaaacgatgaaaccaagtacggaccaatcttccaagggcacgtgaccatttcggcggacacctcaatcaacactgtgtacctccagtggagctcacttaaggccagcgataccgccatgtactattgcgctttccgcggaggggtgtactggggacagggcactactgtgaccgtgtcatccaccactaccccagcaccgaggccacccaccccggctcctaccatcgcctcccagcctctgtccctgcgtccggaggcatgtagacccgcagctggtggggccgtgcatacccggggtcttgacttcgcctgcgatatctacatttgggcccctctggctggtacttgcggggtcctgctgctttcactcgtgatcactctttactgtaagcgcggtcggaagaagctgctgtacatctttaagcaacccttcatgaggcctgtgcagactactcaagaggaggacggctgttcatgccggttcccagaggaggaggaaggcggctgcgaactgcgcgtgaaattcagccgcagcgcagatgctccagcctacaagcaggggcagaaccagctctacaacgaactcaatcttggtcggagagaggagtacgacgtgctggacaagcggagaggacgggacccagaaatgggcgggaagccgcgcagaaagaatccccaagagggcctgtacaacgagctccaaaaggataagatggcagaagcctatagcgagattggtatgaaaggggaacgcagaagaggcaaaggccacgacggactgtaccagggactcagcaccgccaccaaggacacctatgacgctcttcacatgcaggccctgccgcctcgg

SEQ ID NO: 782 - protein, 490 aa, Artificial Sequence
  source: /note="Description of Artificial Sequence: Synthetic polypeptide"
MALPVTALLLPLALLLHAARPDVVMTQSPDSLAVSLGERATINCKSSQSLLDSDGKTYLNWLQQKPGQPPKRLISLVSKLDSGVPDRFSGSGSGTDFTLTISSLQAEDVAVYYCWQGTHFPGTFGGGTKVEIKGGGGSGGGGSGGGGSGGGGSEIQLVQSGAEVKKPGESLRISCKGSGFNIEDYYIHWVRQMPGKGLEWMGRIDPENDETKYGPIFQGHVTISADTSINTVYLQWSSLKASDTAMYYCAFRGGVYWGQGTTVTVSSTTTPAPRPPTPAPTIASQPLSLRPEACRPAAGGAVHTRGLDFACDIYIWAPLAGTCGVLLLSLVITLYCKRGRKKLLYIFKQPFMRPVQTTQEEDGCSCRFPEEEEGGCELRVKFSRSADAPAYKQGQNQLYNELNLGRREEYDVLDKRRGRDPEMGGKPRRKNPQEGLYNELQKDKMAEAYSEIGMKGERRRGKGHDGLYQGLSTATKDTYDALHMQALPPR

SEQ ID NO: 783 - DNA, 1470 bp, Artificial Sequence
  source: /note="Description of Artificial Sequence: Synthetic polynucleotide"
atggccctccctgtcaccgccctgctgcttccgctggctcttctgctccacgccgctcggcccgatgtggtcatgacgcagtcaccactgtccctccccgtgacccttggacagccagcgtcgattagctgcaagtcatcccaatccctgctcgattcggatggaaagacctatctcaactggctgcagcaaagacccggtcagagccctaggagactcatctcgttggtgtcaaagctggacagcggagtgccggaccggttttccggttcgggatcggggacggacttcactctgaagatttcacgggtggaagctgaggatgtgggagtgtactactgctggcagggaacccatttccctggcacttttggcggaggaactaaggtcgaaatcaagggaggaggtggctcgggaggaggcggatcgggcggaggcgggagcggcggaggagggtccgaaatccaacttgtccagtcaggagccgaagtgaagaaaccgggagccaccgtcaaaatcagctgtaagggatcgggattcaatatcgaggactactacatccactgggtgcagcaagctccgggcaaaggactggagtggatggggcgcatcgacccagagaacgacgaaaccaaatacggcccgatcttccaagggcgggtgaccatcaccgcggacacctcaactaacactgtgtacatggagctgagctccctgcgctccgaagatactgcagtctactactgcgccttccgcggtggtgtgtactggggacagggcaccactgtgactgtcagctcgaccactaccccagcaccgaggccacccaccccggctcctaccatcgcctcccagcctctgtccctgcgtccggaggcatgtagacccgcagctggtggggccgtgcatacccggggtcttgacttcgcctgcgatatctacatttgggcccctctggctggtacttgcggggtcctgctgctttcactcgtgatcactctttactgtaagcgcggtcggaagaagctgctgtacatctttaagcaacccttcatgaggcctgtgcagactactcaagaggaggacggctgttcatgccggttcccagaggaggaggaaggcggctgcgaactgcgcgtgaaattcagccgcagcgcagatgctccagcctacaagcaggggcagaaccagctctacaacgaactcaatcttggtcggagagaggagtacgacgtgctggacaagcggagaggacgggacccagaaatgggcgggaagccgcgcagaaagaatccccaagagggcctgtacaacgagctccaaaaggataagatggcagaagcctatagcgagattggtatgaaaggggaacgcagaagaggcaaaggccacgacggactgtaccagggactcagcaccgccaccaaggacacctatgacgctcttcacatgcaggccctgccgcctcgg

SEQ ID NO: 784 - protein, 490 aa, Artificial Sequence
  source: /note="Description of Artificial Sequence: Synthetic polypeptide"
MALPVTALLLPLALLLHAARPDVVMTQSPLSLPVTLGQPASISCKSSQSLLDSDGKTYLNWLQQRPGQSPRRLISLVSKLDSGVPDRFSGSGSGTDFTLKISRVEAEDVGVYYCWQGTHFPGTFGGGTKVEIKGGGGSGGGGSGGGGSGGGGSEIQLVQSGAEVKKPGATVKISCKGSGFNIEDYYIHWVQQAPGKGLEWMGRIDPENDETKYGPIFQGRVTITADTSTNTVYMELSSLRSEDTAVYYCAFRGGVYWGQGTTVTVSSTTTPAPRPPTPAPTIASQPLSLRPEACRPAAGGAVHTRGLDFACDIYIWAPLAGTCGVLLLSLVITLYCKRGRKKLLYIFKQPFMRPVQTTQEEDGCSCRFPEEEEGGCELRVKFSRSADAPAYKQGQNQLYNELNLGRREEYDVLDKRRGRDPEMGGKPRRKNPQEGLYNELQKDKMAEAYSEIGMKGERRRGKGHDGLYQGLSTATKDTYDALHMQALPPR

SEQ ID NO: 785 - DNA, 1461 bp, Artificial Sequence
  source: /note="Description of Artificial Sequence: Synthetic polynucleotide"
atggccctccctgtcaccgccctgctgcttccgctggctcttctgctccacgccgctcggcccgagatccagctccaacagagcggagccgaactggtcaaaccgggagcgtcggtgaagttgtcatgcactggatcgggcttcaacatcgaggattactacatccactgggtcaagcaacgcaccgagcaggggctggaatggatcggacggatcgaccccgaaaacgatgaaaccaagtacgggcctatcttccaaggacgggccaccattacggctgacacgtcaagcaataccgtctacctccagctttccagcctgacctccgaggacactgccgtgtactactgcgccttcagaggaggcgtgtactggggaccaggaaccactttgaccgtgtccagcggaggcggtggatcaggaggaggaggctcaggcggtggcggctcgcacatggacgtggtcatgactcagtccccgctgaccctgtcggtggcaattggacagagcgcatccatctcgtgcaagagctcacagtcgctgctggattccgacggaaagacttatctgaactggctgctccaaagaccagggcaatcaccgaaacgccttatctccctggtgtcgaaactcgactcgggtgtgccggatcggtttaccggtagcgggtccggcacggacttcactctccgcatttcgagggtggaagcggaggatctcgggatctactactgttggcagggaacccacttccctgggacttttggaggcggaactaagctggaaatcaagaccactaccccagcaccgaggccacccaccccggctcctaccatcgcctcccagcctctgtccctgcgtccggaggcatgtagacccgcagctggtggggccgtgcatacccggggtcttgacttcgcctgcgatatctacatttgggcccctctggctggtacttgcggggtcctgctgctttcactcgtgatcactctttactgtaagcgcggtcggaagaagctgctgtacatctttaagcaacccttcatgaggcctgtgcagactactcaagaggaggacggctgttcatgccggttcccagaggaggaggaaggcggctgcgaactgcgcgtgaaattcagccgcagcgcagatgctccagcctacaagcaggggcagaaccagctctacaacgaactcaatcttggtcggagagaggagtacgacgtgctggacaagcggagaggacgggacccagaaatgggcgggaagccgcgcagaaagaatccccaagagggcctgtacaacgagctccaaaaggataagatggcagaagcctatagcgagattggtatgaaaggggaacgcagaagaggcaaaggccacgacggactgtaccagggactcagcaccgccaccaaggacacctatgacgctcttcacatgcaggccctgccgcctcgg

SEQ ID NO: 786 - protein, 487 aa, Artificial Sequence
  source: /note="Description of Artificial Sequence: Synthetic polypeptide"
MALPVTALLLPLALLLHAARPEIQLQQSGAELVKPGASVKLSCTGSGFNIEDYYIHWVKQRTEQGLEWIGRIDPENDETKYGPIFQGRATITADTSSNTVYLQLSSLTSEDTAVYYCAFRGGVYWGPGTTLTVSSGGGGSGGGGSGGGGSHMDVVMTQSPLTLSVAIGQSASISCKSSQSLLDSDGKTYLNWLLQRPGQSPKRLISLVSKLDSGVPDRFTGSGSGTDFTLRISRVEAEDLGIYYCWQGTHFPGTFGGGTKLEIKTTTPAPRPPTPAPTIASQPLSLRPEACRPAAGGAVHTRGLDFACDIYIWAPLAGTCGVLLLSLVITLYCKRGRKKLLYIFKQPFMRPVQTTQEEDGCSCRFPEEEEGGCELRVKFSRSADAPAYKQGQNQLYNELNLGRREEYDVLDKRRGRDPEMGGKPRRKNPQEGLYNELQKDKMAEAYSEIGMKGERRRGKGHDGLYQGLSTATKDTYDALHMQALPPR

SEQ ID NO: 787 - DNA, 1452 bp, Artificial Sequence
  source: /note="Description of Artificial Sequence: Synthetic polynucleotide"
atggccctccctgtcaccgccctgctgcttccgctggctcttctgctccacgccgctcggcccgatatccaaatgactcagagcccttcatccctgagcgccagcgtcggagacagggtgaccatcacgtgccgggcatcccaaggcattagaaataacttggcgtggtatcagcaaaaaccaggaaaggccccgaagcgcctgatctacgcggcctccaaccttcagtcaggagtgccctcgcgcttcaccgggagcggtagcggaactgagtttacccttatcgtgtcgtccctgcagccagaggacttcgcgacctactactgcctccagcatcactcgtacccgttgacttcgggaggcggaaccaaggtcgaaatcaaacgcactggctcgacgtcagggtccggtaaaccgggatcgggagaaggatcggaagtccaagtgctggagagcggaggcggactcgtgcaacctggcgggtcgctgcggctcagctgtgccgcgtcgggttttactttcagctcgtacgctatgtcatgggtgcggcaggctccgggaaaggggctggaatgggtgtccgctatttccggctcgggtggaagcaccaattacgccgactccgtgaagggacgcttcaccatctcacgggataactccaagaatactctgtacctccagatgaactcgctgagagccgaggacaccgcagtgtactactgcgcagggtcaagcggctggtccgaatactggggacagggcaccctcgtcactgtcagctccaccactaccccagcaccgaggccacccaccccggctcctaccatcgcctcccagcctctgtccctgcgtccggaggcatgtagacccgcagctggtggggccgtgcatacccggggtcttgacttcgcctgcgatatctacatttgggcccctctggctggtacttgcggggtcctgctgctttcactcgtgatcactctttactgtaagcgcggtcggaagaagctgctgtacatctttaagcaacccttcatgaggcctgtgcagactactcaagaggaggacggctgttcatgccggttcccagaggaggaggaaggcggctgcgaactgcgcgtgaaattcagccgcagcgcagatgctccagcctacaagcaggggcagaaccagctctacaacgaactcaatcttggtcggagagaggagtacgacgtgctggacaagcggagaggacgggacccagaaatgggcgggaagccgcgcagaaagaatccccaagagggcctgtacaacgagctccaaaaggataagatggcagaagcctatagcgagattggtatgaaaggggaacgcagaagaggcaaaggccacgacggactgtaccagggactcagcaccgccaccaaggacacctatgacgctcttcacatgcaggccctgccgcctcgg

SEQ ID NO: 788 - protein, 484 aa, Artificial Sequence
  source: /note="Description of Artificial Sequence: Synthetic polypeptide"
MALPVTALLLPLALLLHAARPDIQMTQSPSSLSASVGDRVTITCRASQGIRNNLAWYQQKPGKAPKRLIYAASNLQSGVPSRFTGSGSGTEFTLIVSSLQPEDFATYYCLQHHSYPLTSGGGTKVEIKRTGSTSGSGKPGSGEGSEVQVLESGGGLVQPGGSLRLSCAASGFTFSSYAMSWVRQAPGKGLEWVSAISGSGGSTNYADSVKGRFTISRDNSKNTLYLQMNSLRAEDTAVYYCAGSSGWSEYWGQGTLVTVSSTTTPAPRPPTPAPTIASQPLSLRPEACRPAAGGAVHTRGLDFACDIYIWAPLAGTCGVLLLSLVITLYCKRGRKKLLYIFKQPFMRPVQTTQEEDGCSCRFPEEEEGGCELRVKFSRSADAPAYKQGQNQLYNELNLGRREEYDVLDKRRGRDPEMGGKPRRKNPQEGLYNELQKDKMAEAYSEIGMKGERRRGKGHDGLYQGLSTATKDTYDALHMQALPPR

SEQ ID NO: 789 - protein, 483 aa, Artificial Sequence
  source: /note="Description of Artificial Sequence: Synthetic polypeptide"
MALPVTALLLPLALLLHAARPEVQLVESGGGLVQPGGSLRLSCAVSGFALSNHGMSWVRRAPGKGLEWVSGIVYSGSTYYAASVKGRFTISRDNSRNTLYLQMNSLRPEDTAIYYCSAHGGESDVWGQGTTVTVSSASGGGGSGGRASGGGGSDIQLTQSPSSLSASVGDRVTITCRASQSISSYLNWYQQKPGKAPKLLIYAASSLQSGVPSRFSGSGSGTDFTLTISSLQPEDFATYYCQQSYSTPYTFGQGTKVEIKTTTPAPRPPTPAPTIASQPLSLRPEACRPAAGGAVHTRGLDFACDIYIWAPLAGTCGVLLLSLVITLYCKRGRKKLLYIFKQPFMRPVQTTQEEDGCSCRFPEEEEGGCELRVKFSRSADAPAYKQGQNQLYNELNLGRREEYDVLDKRRGRDPEMGGKPRRKNPQEGLYNELQKDKMAEAYSEIGMKGERRRGKGHDGLYQGLSTATKDTYDALHMQALPPR

SEQ ID NO: 790 - DNA, 1449 bp, Artificial Sequence
  source: /note="Description of Artificial Sequence: Synthetic polynucleotide"
atggccctccctgtcaccgccctgctgcttccgctggctcttctgctccacgccgctcggcccgaagtgcaattggtggaatcagggggaggacttgtgcagcctggaggatcgctgagactgtcatgtgccgtgtccggctttgccctgtccaaccacgggatgtcctgggtccgccgcgcgcctggaaagggcctcgaatgggtgtcgggtattgtgtacagcggtagcacctactatgccgcatccgtgaaggggagattcaccatcagccgggacaactccaggaacactctgtacctccaaatgaattcgctgaggccagaggacactgccatctactactgctccgcgcatggcggagagtccgacgtctggggacaggggaccaccgtgaccgtgtctagcgcgtccggcggaggcggcagcgggggtcgggcatcagggggcggcggatcggacatccagctcacccagtccccgagctcgctgtccgcctccgtgggagatcgggtcaccatcacgtgccgcgccagccagtcgatttcctcctacctgaactggtaccaacagaagcccggaaaagccccgaagcttctcatctacgccgcctcgagcctgcagtcaggagtgccctcacggttctccggctccggttccggtactgatttcaccctgaccatttcctccctgcaaccggaggacttcgctacttactactgccagcagtcgtactccaccccctacactttcggacaaggcaccaaggtcgaaatcaagaccactaccccagcaccgaggccacccaccccggctcctaccatcgcctcccagcctctgtccctgcgtccggaggcatgtagacccgcagctggtggggccgtgcatacccggggtcttgacttcgcctgcgatatctacatttgggcccctctggctggtacttgcggggtcctgctgctttcactcgtgatcactctttactgtaagcgcggtcggaagaagctgctgtacatctttaagcaacccttcatgaggcctgtgcagactactcaagaggaggacggctgttcatgccggttcccagaggaggaggaaggcggctgcgaactgcgcgtgaaattcagccgcagcgcagatgctccagcctacaagcaggggcagaaccagctctacaacgaactcaatcttggtcggagagaggagtacgacgtgctggacaagcggagaggacgggacccagaaatgggcgggaagccgcgcagaaagaatccccaagagggcctgtacaacgagctccaaaaggataagatggcagaagcctatagcgagattggtatgaaaggggaacgcagaagaggcaaaggccacgacggactgtaccagggactcagcaccgccaccaaggacacctatgacgctcttcacatgcaggccctgccgcctcgg

SEQ ID NO: 791 - protein, 490 aa, Artificial Sequence
  source: /note="Description of Artificial Sequence: Synthetic polypeptide"
MALPVTALLLPLALLLHAARPQVQLVESGGGLVQPGRSLRLSCAASGFTFSNYAMSWVRQAPGKGLGWVSGISRSGENTYYADSVKGRFTISRDNSKNTLYLQMNSLRDEDTAVYYCARSPAHYYGGMDVWGQGTTVTVSSASGGGGSGGRASGGGGSDIVLTQSPGTLSLSPGERATLSCRASQSISSSFLAWYQQKPGQAPRLLIYGASRRATGIPDRFSGSGSGTDFTLTISRLEPEDSAVYYCQQYHSSPSWTFGQGTKLEIKTTTPAPRPPTPAPTIASQPLSLRPEACRPAAGGAVHTRGLDFACDIYIWAPLAGTCGVLLLSLVITLYCKRGRKKLLYIFKQPFMRPVQTTQEEDGCSCRFPEEEEGGCELRVKFSRSADAPAYKQGQNQLYNELNLGRREEYDVLDKRRGRDPEMGGKPRRKNPQEGLYNELQKDKMAEAYSEIGMKGERRRGKGHDGLYQGLSTATKDTYDALHMQALPPR

SEQ ID NO: 792 - DNA, 1470 bp, Artificial Sequence
  source: /note="Description of Artificial Sequence: Synthetic polynucleotide"
atggccctccctgtcaccgccctgctgcttccgctggctcttctgctccacgccgctcggccccaagtgcaactcgtggaatctggtggaggactcgtgcaacccggaagatcgcttagactgtcgtgtgccgccagcgggttcactttctcgaactacgcgatgtcctgggtccgccaggcacccggaaagggactcggttgggtgtccggcatttcccggtccggcgaaaatacctactacgccgactccgtgaagggccgcttcaccatctcaagggacaacagcaaaaacaccctgtacttgcaaatgaactccctgcgggatgaagatacagccgtgtactattgcgcccggtcgcctgcccattactacggcggaatggacgtctggggacagggaaccactgtgactgtcagcagcgcgtcgggtggcggcggctcagggggtcgggcctccggggggggagggtccgacatcgtgctgacccagtccccgggaaccctgagcctgagcccgggagagcgcgcgaccctgtcatgccgggcatcccagagcattagctcctcctttctcgcctggtatcagcagaagcccggacaggccccgaggctgctgatctacggcgctagcagaagggctaccggaatcccagaccggttctccggctccggttccgggaccgatttcacccttactatctcgcgcctggaacctgaggactccgccgtctactactgccagcagtaccactcatccccgtcgtggacgttcggacagggcaccaagctggagattaagaccactaccccagcaccgaggccacccaccccggctcctaccatcgcctcccagcctctgtccctgcgtccggaggcatgtagacccgcagctggtggggccgtgcatacccggggtcttgacttcgcctgcgatatctacatttgggcccctctggctggtacttgcggggtcctgctgctttcactcgtgatcactctttactgtaagcgcggtcggaagaagctgctgtacatctttaagcaacccttcatgaggcctgtgcagactactcaagaggaggacggctgttcatgccggttcccagaggaggaggaaggcggctgcgaactgcgcgtgaaattcagccgcagcgcagatgctccagcctacaagcaggggcagaaccagctctacaacgaactcaatcttggtcggagagaggagtacgacgtgctggacaagcggagaggacgggacccagaaatgggcgggaagccgcgcagaaagaatccccaagagggcctgtacaacgagctccaaaaggataagatggcagaagcctatagcgagattggtatgaaaggggaacgcagaagaggcaaaggccacgacggactgtaccagggactcagcaccgccaccaaggacacctatgacgctcttcacatgcaggccctgccgcctcgg

SEQ ID NO: 793 - protein, 488 aa, Artificial Sequence
  source: /note="Description of Artificial Sequence: Synthetic polypeptide"
MALPVTALLLPLALLLHAARPQVQLVESGGGLVQPGRSLRLSCAASGFTFDDYAMHWVRQAPGKGLEWVSGISWNSGSIGYADSVKGRFTISRDNAKNSLYLQMNSLRAEDTALYYCSVHSFLAYWGQGTLVTVSSASGGGGSGGRASGGGGSDIVMTQTPLSLPVTPGEPASISCRSSQSLLHSNGYNYLDWYLQKPGQSPQLLIYLGSNRASGVPDRFSGSGSGTDFTLKISRVEAEDVGVYYCMQALQTPYTFGQGTKVEIKTTTPAPRPPTPAPTIASQPLSLRPEACRPAAGGAVHTRGLDFACDIYIWAPLAGTCGVLLLSLVITLYCKRGRKKLLYIFKQPFMRPVQTTQEEDGCSCRFPEEEEGGCELRVKFSRSADAPAYKQGQNQLYNELNLGRREEYDVLDKRRGRDPEMGGKPRRKNPQEGLYNELQKDKMAEAYSEIGMKGERRRGKGHDGLYQGLSTATKDTYDALHMQALPPR

SEQ ID NO: 794 - DNA, 1464 bp, Artificial Sequence
  source: /note="Description of Artificial Sequence: Synthetic polynucleotide"
atggccctccctgtcaccgccctgctgcttccgctggctcttctgctccacgccgctcggccccaagtgcaactcgtcgaatccggtggaggtctggtccaacctggtagaagcctgagactgtcgtgtgcggccagcggattcacctttgatgactatgctatgcactgggtgcggcaggccccaggaaagggcctggaatgggtgtcgggaattagctggaactccgggtccattggctacgccgactccgtgaagggccgcttcaccatctcccgcgacaacgcaaagaactccctgtacttgcaaatgaactcgctcagggctgaggataccgcgctgtactactgctccgtgcattccttcctggcctactggggacagggaactctggtcaccgtgtcgagcgcctccggcggcgggggctcgggtggacgggcctcgggcggaggggggtccgacatcgtgatgacccagaccccgctgagcttgcccgtgactcccggagagcctgcatccatctcctgccggtcatcccagtcccttctccactccaacggatacaactacctcgactggtacctccagaagccgggacagagccctcagcttctgatctacctggggtcaaatagagcctcaggagtgccggatcggttcagcggatctggttcgggaactgatttcactctgaagatttcccgcgtggaagccgaggacgtgggcgtctactactgtatgcaggcgctgcagaccccctataccttcggccaagggacgaaagtggagatcaagaccactaccccagcaccgaggccacccaccccggctcctaccatcgcctcccagcctctgtccctgcgtccggaggcatgtagacccgcagctggtggggccgtgcatacccggggtcttgacttcgcctgcgatatctacatttgggcccctctggctggtacttgcggggtcctgctgctttcactcgtgatcactctttactgtaagcgcggtcggaagaagctgctgtacatctttaagcaacccttcatgaggcctgtgcagactactcaagaggaggacggctgttcatgccggttcccagaggaggaggaaggcggctgcgaactgcgcgtgaaattcagccgcagcgcagatgctccagcctacaagcaggggcagaaccagctctacaacgaactcaatcttggtcggagagaggagtacgacgtgctggacaagcggagaggacgggacccagaaatgggcgggaagccgcgcagaaagaatccccaagagggcctgtacaacgagctccaaaaggataagatggcagaagcctatagcgagattggtatgaaaggggaacgcagaagaggcaaaggccacgacggactgtaccagggactcagcaccgccaccaaggacacctatgacgctcttcacatgcaggccctgccgcctcgg

SEQ ID NO: 795 - protein, 487 aa, Artificial Sequence
  source: /note="Description of Artificial Sequence: Synthetic polypeptide"
MALPVTALLLPLALLLHAARPEVQLLESGGGLVQPGGSLRLSCAVSGFALSNHGMSWVRRAPGKGLEWVSGIVYSGSTYYAASVKGRFTISRDNSRNTLYLQMNSLRPEDTAIYYCSAHGGESDVWGQGTTVTVSSASGGGGSGGRASGGGGSDIVMTQTPLSLSVTPGQPASISCKSSQSLLRNDGKTPLYWYLQKAGQPPQLLIYEVSNRFSGVPDRFSGSGSGTDFTLKISRVEAEDVGAYYCMQNIQFPSFGGGTKLEIKTTTPAPRPPTPAPTIASQPLSLRPEACRPAAGGAVHTRGLDFACDIYIWAPLAGTCGVLLLSLVITLYCKRGRKKLLYIFKQPFMRPVQTTQEEDGCSCRFPEEEEGGCELRVKFSRSADAPAYKQGQNQLYNELNLGRREEYDVLDKRRGRDPEMGGKPRRKNPQEGLYNELQKDKMAEAYSEIGMKGERRRGKGHDGLYQGLSTATKDTYDALHMQALPPR

SEQ ID NO: 796 - DNA, 1461 bp, Artificial Sequence
  source: /note="Description of Artificial Sequence: Synthetic polynucleotide"
atggccctccctgtcaccgccctgctgcttccgctggctcttctgctccacgccgctcggcccgaagtgcaattgttggaatctggaggaggacttgtgcagcctggaggatcactgagactttcgtgtgcggtgtcaggcttcgccctgagcaaccacggcatgagctgggtgcggagagccccggggaagggtctggaatgggtgtccgggatcgtctactccggttcaacttactacgccgcaagcgtgaagggtcgcttcaccatttcccgcgataactcccggaacaccctgtacctccaaatgaactccctgcggcccgaggacaccgccatctactactgttccgcgcatggaggagagtccgatgtctggggacagggcactaccgtgaccgtgtcgagcgcctcggggggaggaggctccggcggtcgcgcctccggggggggtggcagcgacattgtgatgacgcagactccactctcgctgtccgtgaccccgggacagcccgcgtccatctcgtgcaagagctcccagagcctgctgaggaacgacggaaagactcctctgtattggtacctccagaaggctggacagcccccgcaactgctcatctacgaagtgtcaaatcgcttctccggggtgccggatcggttttccggctcgggatcgggcaccgacttcaccctgaaaatctccagggtcgaggccgaggacgtgggagcctactactgcatgcaaaacatccagttcccttccttcggcggcggcacaaagctggagattaagaccactaccccagcaccgaggccacccaccccggctcctaccatcgcctcccagcctctgtccctgcgtccggaggcatgtagacccgcagctggtggggccgtgcatacccggggtcttgacttcgcctgcgatatctacatttgggcccctctggctggtacttgcggggtcctgctgctttcactcgtgatcactctttactgtaagcgcggtcggaagaagctgctgtacatctttaagcaacccttcatgaggcctgtgcagactactcaagaggaggacggctgttcatgccggttcccagaggaggaggaaggcggctgcgaactgcgcgtgaaattcagccgcagcgcagatgctccagcctacaagcaggggcagaaccagctctacaacgaactcaatcttggtcggagagaggagtacgacgtgctggacaagcggagaggacgggacccagaaatgggcgggaagccgcgcagaaagaatccccaagagggcctgtacaacgagctccaaaaggataagatggcagaagcctatagcgagattggtatgaaaggggaacgcagaagaggcaaaggccacgacggactgtaccagggactcagcaccgccaccaaggacacctatgacgctcttcacatgcaggccctgccgcctcgg

SEQ ID NO: 797 - protein, 493 aa, Artificial Sequence
  source: /note="Description of Artificial Sequence: Synthetic polypeptide"
MALPVTALLLPLALLLHAARPQVQLVQSGAEVRKTGASVKVSCKASGYIFDNFGINWVRQAPGQGLEWMGWINPKNNNTNYAQKFQGRVTITADESTNTAYMEVSSLRSEDTAVYYCARGPYYYQSYMDVWGQGTMVTVSSASGGGGSGGRASGGGGSDIVMTQTPLSLPVTPGEPASISCRSSQSLLHSNGYNYLNWYLQKPGQSPQLLIYLGSKRASGVPDRFSGSGSGTDFTLHITRVGAEDVGVYYCMQALQTPYTFGQGTKLEIKTTTPAPRPPTPAPTIASQPLSLRPEACRPAAGGAVHTRGLDFACDIYIWAPLAGTCGVLLLSLVITLYCKRGRKKLLYIFKQPFMRPVQTTQEEDGCSCRFPEEEEGGCELRVKFSRSADAPAYKQGQNQLYNELNLGRREEYDVLDKRRGRDPEMGGKPRRKNPQEGLYNELQKDKMAEAYSEIGMKGERRRGKGHDGLYQGLSTATKDTYDALHMQALPPR

SEQ ID NO: 798 - DNA, 1479 bp, Artificial Sequence
  source: /note="Description of Artificial Sequence: Synthetic polynucleotide"
atggccctccctgtcaccgccctgctgcttccgctggctcttctgctccacgccgctcggccccaagtccaactcgtccagtccggcgcagaagtcagaaaaaccggtgctagcgtgaaagtgtcctgcaaggcctccggctacattttcgataacttcggaatcaactgggtcagacaggccccgggccaggggctggaatggatgggatggatcaaccccaagaacaacaacaccaactacgcacagaagttccagggccgcgtgactatcaccgccgatgaatcgaccaataccgcctacatggaggtgtcctccctgcggtcggaggacactgccgtgtattactgcgcgaggggcccatactactaccaaagctacatggacgtctggggacagggaaccatggtgaccgtgtcatccgcctccggtggtggaggctccggggggcgggcttcaggaggcggaggaagcgatattgtgatgacccagactccgcttagcctgcccgtgactcctggagaaccggcctccatttcctgccggtcctcgcaatcactcctgcattccaacggttacaactacctgaattggtacctccagaagcctggccagtcgccccagttgctgatctatctgggctcgaagcgcgcctccggggtgcctgaccggtttagcggatctgggagcggcacggacttcactctccacatcacccgcgtgggagcggaggacgtgggagtgtactactgtatgcaggcgctgcagactccgtacacattcggacagggcaccaagctggagatcaagaccactaccccagcaccgaggccacccaccccggctcctaccatcgcctcccagcctctgtccctgcgtccggaggcatgtagacccgcagctggtggggccgtgcatacccggggtcttgacttcgcctgcgatatctacatttgggcccctctggctggtacttgcggggtcctgctgctttcactcgtgatcactctttactgtaagcgcggtcggaagaagctgctgtacatctttaagcaacccttcatgaggcctgtgcagactactcaagaggaggacggctgttcatgccggttcccagaggaggaggaaggcggctgcgaactgcgcgtgaaattcagccgcagcgcagatgctccagcctacaagcaggggcagaaccagctctacaacgaactcaatcttggtcggagagaggagtacgacgtgctggacaagcggagaggacgggacccagaaatgggcgggaagccgcgcagaaagaatccccaagagggcctgtacaacgagctccaaaaggataagatggcagaagcctatagcgagattggtatgaaaggggaacgcagaagaggcaaaggccacgacggactgtaccagggactcagcaccgccaccaaggacacctatgacgctcttcacatgcaggccctgccgcctcgg

SEQ ID NO: 799 - protein, 490 aa, Artificial Sequence
  source: /note="Description of Artificial Sequence: Synthetic polypeptide"
MALPVTALLLPLALLLHAARPQVQLQESGGGLVQPGGSLRLSCAASGFTFSSDAMTWVRQAPGKGLEWVSVISGSGGTTYYADSVKGRFTISRDNSKNTLYLQMNSLRAEDTAVYYCAKLDSSGYYYARGPRYWGQGTLVTVSSASGGGGSGGRASGGGGSDIQLTQSPSSLSASVGDRVTITCRASQSISSYLNWYQQKPGKAPKLLIYGASTLASGVPARFSGSGSGTHFTLTINSLQSEDSATYYCQQSYKRASFGQGTKVEIKTTTPAPRPPTPAPTIASQPLSLRPEACRPAAGGAVHTRGLDFACDIYIWAPLAGTCGVLLLSLVITLYCKRGRKKLLYIFKQPFMRPVQTTQEEDGCSCRFPEEEEGGCELRVKFSRSADAPAYKQGQNQLYNELNLGRREEYDVLDKRRGRDPEMGGKPRRKNPQEGLYNELQKDKMAEAYSEIGMKGERRRGKGHDGLYQGLSTATKDTYDALHMQALPPR

SEQ ID NO: 800 - DNA, 1470 bp, Artificial Sequence
  source: /note="Description of Artificial Sequence: Synthetic polynucleotide"
atggccctccctgtcaccgccctgctgcttccgctggctcttctgctccacgccgctcggccccaagtgcaacttcaagaatcaggcggaggactcgtgcagcccggaggatcattgcggctctcgtgcgccgcctcgggcttcaccttctcgagcgacgccatgacctgggtccgccaggccccggggaaggggctggaatgggtgtctgtgatttccggctccgggggaactacgtactacgccgattccgtgaaaggtcgcttcactatctcccgggacaacagcaagaacaccctttatctgcaaatgaattccctccgcgccgaggacaccgccgtgtactactgcgccaagctggactcctcgggctactactatgcccggggtccgagatactggggacagggaaccctcgtgaccgtgtcctccgcgtccggcggaggagggtcgggagggcgggcctccggcggcggcggttcggacatccagctgacccagtccccatcctcactgagcgcaagcgtgggcgacagagtcaccattacatgcagggcgtcccagagcatcagctcctacctgaactggtaccaacagaagcctggaaaggctcctaagctgttgatctacggggcttcgaccctggcatccggggtgcccgcgaggtttagcggaagcggtagcggcactcacttcactctgaccattaacagcctccagtccgaggattcagccacttactactgtcagcagtcctacaagcgggccagcttcggacagggcactaaggtcgagatcaagaccactaccccagcaccgaggccacccaccccggctcctaccatcgcctcccagcctctgtccctgcgtccggaggcatgtagacccgcagctggtggggccgtgcatacccggggtcttgacttcgcctgcgatatctacatttgggcccctctggctggtacttgcggggtcctgctgctttcactcgtgatcactctttactgtaagcgcggtcggaagaagctgctgtacatctttaagcaacccttcatgaggcctgtgcagactactcaagaggaggacggctgttcatgccggttcccagaggaggaggaaggcggctgcgaactgcgcgtgaaattcagccgcagcgcagatgctccagcctacaagcaggggcagaaccagctctacaacgaactcaatcttggtcggagagaggagtacgacgtgctggacaagcggagaggacgggacccagaaatgggcgggaagccgcgcagaaagaatccccaagagggcctgtacaacgagctccaaaaggataagatggcagaagcctatagcgagattggtatgaaaggggaacgcagaagaggcaaaggccacgacggactgtaccagggactcagcaccgccaccaaggacacctatgacgctcttcacatgcaggccctgccgcctcgg

SEQ ID NO: 801 - protein, 491 aa, Artificial Sequence
  source: /note="Description of Artificial Sequence: Synthetic polypeptide"
MALPVTALLLPLALLLHAARPQVQLVQSGAEVKKPGASVKVSCKASGYTFSNYGITWVRQAPGQGLEWMGWISAYNGNTNYAQKFQGRVTMTRNTSISTAYMELSSLRSEDTAVYYCARGPYYYYMDVWGKGTMVTVSSASGGGGSGGRASGGGGSEIVMTQSPLSLPVTPGEPASISCRSSQSLLYSNGYNYVDWYLQKPGQSPQLLIYLGSNRASGVPDRFSGSGSGTDFKLQISRVEAEDVGIYYCMQGRQFPYSFGQGTKVEIKTTTPAPRPPTPAPTIASQPLSLRPEACRPAAGGAVHTRGLDFACDIYIWAPLAGTCGVLLLSLVITLYCKRGRKKLLYIFKQPFMRPVQTTQEEDGCSCRFPEEEEGGCELRVKFSRSADAPAYKQGQNQLYNELNLGRREEYDVLDKRRGRDPEMGGKPRRKNPQEGLYNELQKDKMAEAYSEIGMKGERRRGKGHDGLYQGLSTATKDTYDALHMQALPPR

SEQ ID NO: 802 - DNA, 1473 bp, Artificial Sequence
  source: /note="Description of Artificial Sequence: Synthetic polynucleotide"
atggccctccctgtcaccgccctgctgcttccgctggctcttctgctccacgccgctcggccccaagtccaactggtccagagcggtgcagaagtgaagaagcccggagcgagcgtgaaagtgtcctgcaaggcttccgggtacaccttctccaactacggcatcacttgggtgcgccaggccccgggacagggcctggaatggatggggtggatttccgcgtacaacggcaatacgaactacgctcagaagttccagggtagagtgaccatgactaggaacacctccatttccaccgcctacatggaactgtcctccctgcggagcgaggacaccgccgtgtactattgcgcccggggaccatactactactacatggatgtctgggggaaggggactatggtcaccgtgtcatccgcctcgggaggcggcggatcaggaggacgcgcctctggtggtggaggatcggagatcgtgatgacccagagccctctctccttgcccgtgactcctggggagcccgcatccatttcatgccggagctcccagtcacttctctactccaacggctataactacgtggattggtacctccaaaagccgggccagagcccgcagctgctgatctacctgggctcgaacagggccagcggagtgcctgaccggttctccgggtcgggaagcgggaccgacttcaagctgcaaatctcgagagtggaggccgaggacgtgggaatctactactgtatgcagggccgccagtttccgtactcgttcggacagggcaccaaagtggaaatcaagaccactaccccagcaccgaggccacccaccccggctcctaccatcgcctcccagcctctgtccctgcgtccggaggcatgtagacccgcagctggtggggccgtgcatacccggggtcttgacttcgcctgcgatatctacatttgggcccctctggctggtacttgcggggtcctgctgctttcactcgtgatcactctttactgtaagcgcggtcggaagaagctgctgtacatctttaagcaacccttcatgaggcctgtgcagactactcaagaggaggacggctgttcatgccggttcccagaggaggaggaaggcggctgcgaactgcgcgtgaaattcagccgcagcgcagatgctccagcctacaagcaggggcagaaccagctctacaacgaactcaatcttggtcggagagaggagtacgacgtgctggacaagcggagaggacgggacccagaaatgggcgggaagccgcgcagaaagaatccccaagagggcctgtacaacgagctccaaaaggataagatggcagaagcctatagcgagattggtatgaaaggggaacgcagaagaggcaaaggccacgacggactgtaccagggactcagcaccgccaccaaggacacctatgacgctcttcacatgcaggccctgccgcctcgg

SEQ ID NO: 803 - protein, 482 aa, Artificial Sequence
  source: /note="Description of Artificial Sequence: Synthetic polypeptide"
MALPVTALLLPLALLLHAARPEVQLLETGGGLVQPGGSLRLSCAVSGFALSNHGMSWVRRAPGKGLEWVSGIVYSGSTYYAASVKGRFTISRDNSRNTLYLQMNSLRPEDTAIYYCSAHGGESDVWGQGTTVTVSSASGGGGSGGRASGGGGSEIVLTQSPATLSVSPGESATLSCRASQSVSSNLAWYQQKPGQAPRLLIYGASTRASGIPDRFSGSGSGTDFTLTISSLQAEDVAVYYCQQYGSSLTFGGGTKVEIKTTTPAPRPPTPAPTIASQPLSLRPEACRPAAGGAVHTRGLDFACDIYIWAPLAGTCGVLLLSLVITLYCKRGRKKLLYIFKQPFMRPVQTTQEEDGCSCRFPEEEEGGCELRVKFSRSADAPAYKQGQNQLYNELNLGRREEYDVLDKRRGRDPEMGGKPRRKNPQEGLYNELQKDKMAEAYSEIGMKGERRRGKGHDGLYQGLSTATKDTYDALHMQALPPR

SEQ ID NO: 804 - DNA, 1446 bp, Artificial Sequence
  source: /note="Description of Artificial Sequence: Synthetic polynucleotide"
atggccctccctgtcaccgccctgctgcttccgctggctcttctgctccacgccgctcggcccgaagtgcaattgctcgaaactggaggaggtctggtgcaacctggaggatcacttcgcctgtcctgcgccgtgtcgggctttgccctgtccaaccatggaatgagctgggtccgccgcgcgccggggaagggcctcgaatgggtgtccggcatcgtctactccggctccacctactacgccgcgtccgtgaagggccggttcacgatttcacgggacaactcgcggaacaccctgtacctccaaatgaattcccttcggccggaggatactgccatctactactgctccgcccacggtggcgaatccgacgtctggggccagggaaccaccgtgaccgtgtccagcgcgtccgggggaggaggaagcgggggtagagcatcgggtggaggcggatcagagatcgtgctgacccagtcccccgccaccttgagcgtgtcaccaggagagtccgccaccctgtcatgccgcgccagccagtccgtgtcctccaacctggcttggtaccagcagaagccggggcaggcccctagactcctgatctatggggcgtcgacccgggcatctggaattcccgataggttcagcggatcgggctcgggcactgacttcactctgaccatctcctcgctgcaagccgaggacgtggctgtgtactactgtcagcagtacggaagctccctgactttcggtggcgggaccaaagtcgagattaagaccactaccccagcaccgaggccacccaccccggctcctaccatcgcctcccagcctctgtccctgcgtccggaggcatgtagacccgcagctggtggggccgtgcatacccggggtcttgacttcgcctgcgatatctacatttgggcccctctggctggtacttgcggggtcctgctgctttcactcgtgatcactctttactgtaagcgcggtcggaagaagctgctgtacatctttaagcaacccttcatgaggcctgtgcagactactcaagaggaggacggctgttcatgccggttcccagaggaggaggaaggcggctgcgaactgcgcgtgaaattcagccgcagcgcagatgctccagcctacaagcaggggcagaaccagctctacaacgaactcaatcttggtcggagagaggagtacgacgtgctggacaagcggagaggacgggacccagaaatgggcgggaagccgcgcagaaagaatccccaagagggcctgtacaacgagctccaaaaggataagatggcagaagcctatagcgagattggtatgaaaggggaacgcagaagaggcaaaggccacgacggactgtaccagggactcagcaccgccaccaaggacacctatgacgctcttcacatgcaggccctgccgcctcgg

SEQ ID NO: 805 - protein, 483 aa, Artificial Sequence
  source: /note="Description of Artificial Sequence: Synthetic polypeptide"
MALPVTALLLPLALLLHAARPEVQLVETGGGLVQPGGSLRLSCAVSGFALSNHGMSWVRRAPGKGLEWVSGIVYSGSTYYAASVKGRFTISRDNSRNTLYLQMNSLRPEDTAIYYCSAHGGESDVWGQGTTVTVSSASGGGGSGGRASGGGGSEIVMTQSPATLSVSPGERATLSCRASQSVSSKLAWYQQKPGQAPRLLMYGASIRATGIPDRFSGSGSGTEFTLTISSLEPEDFAVYYCQQYGSSSWTFGQGTKVEIKTTTPAPRPPTPAPTIASQPLSLRPEACRPAAGGAVHTRGLDFACDIYIWAPLAGTCGVLLLSLVITLYCKRGRKKLLYIFKQPFMRPVQTTQEEDGCSCRFPEEEEGGCELRVKFSRSADAPAYKQGQNQLYNELNLGRREEYDVLDKRRGRDPEMGGKPRRKNPQEGLYNELQKDKMAEAYSEIGMKGERRRGKGHDGLYQGLSTATKDTYDALHMQALPPR

SEQ ID NO: 806 - DNA, 1449 bp, Artificial Sequence
  source: /note="Description of Artificial Sequence: Synthetic polynucleotide"
atggccctccctgtcaccgccctgctgcttccgctggctcttctgctccacgccgctcggcccgaagtgcaattggtggaaactggaggaggacttgtgcaacctggaggatcattgagactgagctgcgcagtgtcgggattcgccctgagcaaccatggaatgtcctgggtcagaagggcccctggaaaaggcctcgaatgggtgtcagggatcgtgtactccggttccacttactacgccgcctccgtgaaggggcgcttcactatctcacgggataactcccgcaataccctgtacctccaaatgaacagcctgcggccggaggataccgccatctactactgttccgcccacggtggagagtctgacgtctggggccagggaactaccgtgaccgtgtcctccgcgtccggcggtggagggagcggcggccgcgccagcggcggcggaggctccgagatcgtgatgacccagagccccgctactctgtcggtgtcgcccggagaaagggcgaccctgtcctgccgggcgtcgcagtccgtgagcagcaagctggcttggtaccagcagaagccgggccaggcaccacgcctgcttatgtacggtgcctccattcgggccaccggaatcccggaccggttctcggggtcggggtccggtaccgagttcacactgaccatttcctcgctcgagcccgaggactttgccgtctattactgccagcagtacggctcctcctcatggacgttcggccaggggaccaaggtcgaaatcaagaccactaccccagcaccgaggccacccaccccggctcctaccatcgcctcccagcctctgtccctgcgtccggaggcatgtagacccgcagctggtggggccgtgcatacccggggtcttgacttcgcctgcgatatctacatttgggcccctctggctggtacttgcggggtcctgctgctttcactcgtgatcactctttactgtaagcgcggtcggaagaagctgctgtacatctttaagcaacccttcatgaggcctgtgcagactactcaagaggaggacggctgttcatgccggttcccagaggaggaggaaggcggctgcgaactgcgcgtgaaattcagccgcagcgcagatgctccagcctacaagcaggggcagaaccagctctacaacgaactcaatcttggtcggagagaggagtacgacgtgctggacaagcggagaggacgggacccagaaatgggcgggaagccgcgcagaaagaatccccaagagggcctgtacaacgagctccaaaaggataagatggcagaagcctatagcgagattggtatgaaaggggaacgcagaagaggcaaaggccacgacggactgtaccagggactcagcaccgccaccaaggacacctatgacgctcttcacatgcaggccctgccgcctcgg

SEQ ID NO: 807 - protein, 485 aa, Artificial Sequence
  source: /note="Description of Artificial Sequence: Synthetic polypeptide"
MALPVTALLLPLALLLHAARPEVQLVETGGGVVQPGGSLRLSCAVSGFALSNHGMSWVRRAPGKGLEWVSGIVYSGSTYYAASVKGRFTISRDNSRNTLYLQMNSLRPEDTAIYYCSAHGGESDVWGQGTTVTVSSASGGGGSGGRASGGGGSEIVLTQSPGTLSLSPGERATLSCRASQSVGSTNLAWYQQKPGQAPRLLIYDASNRATGIPDRFSGGGSGTDFTLTISRLEPEDFAVYYCQQYGSSPPWTFGQGTKVEIKTTTPAPRPPTPAPTIASQPLSLRPEACRPAAGGAVHTRGLDFACDIYIWAPLAGTCGVLLLSLVITLYCKRGRKKLLYIFKQPFMRPVQTTQEEDGCSCRFPEEEEGGCELRVKFSRSADAPAYKQGQNQLYNELNLGRREEYDVLDKRRGRDPEMGGKPRRKNPQEGLYNELQKDKMAEAYSEIGMKGERRRGKGHDGLYQGLSTATKDTYDALHMQALPPR

SEQ ID NO: 808 - DNA, 1455 bp, Artificial Sequence
  source: /note="Description of Artificial Sequence: Synthetic polynucleotide"
atggccctccctgtcaccgccctgctgcttccgctggctcttctgctccacgccgctcggcccgaagtgcaattggtggagactggaggaggagtggtgcaacctggaggaagcctgagactgtcatgcgcggtgtcgggcttcgccctctccaaccacggaatgtcctgggtccgccgggcccctgggaaaggacttgaatgggtgtccggcatcgtgtactcgggttccacctactacgcggcctcagtgaagggccggtttactattagccgcgacaactccagaaacacactgtacctccaaatgaactcgctgcggccggaagataccgctatctactactgctccgcccatgggggagagtcggacgtctggggacagggcaccactgtcactgtgtccagcgcttccggcggtggtggaagcgggggacgggcctcaggaggcggtggcagcgagattgtgctgacccagtcccccgggaccctgagcctgtccccgggagaaagggccaccctctcctgtcgggcatcccagtccgtggggtctactaaccttgcatggtaccagcagaagcccggccaggcccctcgcctgctgatctacgacgcgtccaatagagccaccggcatcccggatcgcttcagcggaggcggatcgggcaccgacttcaccctcaccatttcaaggctggaaccggaggacttcgccgtgtactactgccagcagtatggttcgtccccaccctggacgttcggccaggggactaaggtcgagatcaagaccactaccccagcaccgaggccacccaccccggctcctaccatcgcctcccagcctctgtccctgcgtccggaggcatgtagacccgcagctggtggggccgtgcatacccggggtcttgacttcgcctgcgatatctacatttgggcccctctggctggtacttgcggggtcctgctgctttcactcgtgatcactctttactgtaagcgcggtcggaagaagctgctgtacatctttaagcaacccttcatgaggcctgtgcagactactcaagaggaggacggctgttcatgccggttcccagaggaggaggaaggcggctgcgaactgcgcgtgaaattcagccgcagcgcagatgctccagcctacaagcaggggcagaaccagctctacaacgaactcaatcttggtcggagagaggagtacgacgtgctggacaagcggagaggacgggacccagaaatgggcgggaagccgcgcagaaagaatccccaagagggcctgtacaacgagctccaaaaggataagatggcagaagcctatagcgagattggtatgaaaggggaacgcagaagaggcaaaggccacgacggactgtaccagggactcagcaccgccaccaaggacacctatgacgctcttcacatgcaggccctgccgcctcgg

SEQ ID NO: 809 - protein, 483 aa, Artificial Sequence
  source: /note="Description of Artificial Sequence: Synthetic polypeptide"
MALPVTALLLPLALLLHAARPQVQLVESGGGLVKPGGSLRLSCAASGFTFSDYYMSWIRQAPGKGLEWVSYISSSGSTIYYADSVKGRFTISRDNAKNSLYLQMNSLRAEDTAVYYCARESGDGMDVWGQGTTVTVSSASGGGGSGGRASGGGGSDIQMTQSPSSLSASVGDRVTITCRASQSISSYLNWYQQKPGKAPKLLIYAASSLQSGVPSRFSGSGSGTDFTLTISSLQPEDFATYYCQQSYTLAFGQGTKVDIKTTTPAPRPPTPAPTIASQPLSLRPEACRPAAGGAVHTRGLDFACDIYIWAPLAGTCGVLLLSLVITLYCKRGRKKLLYIFKQPFMRPVQTTQEEDGCSCRFPEEEEGGCELRVKFSRSADAPAYKQGQNQLYNELNLGRREEYDVLDKRRGRDPEMGGKPRRKNPQEGLYNELQKDKMAEAYSEIGMKGERRRGKGHDGLYQGLSTATKDTYDALHMQALPPR

SEQ ID NO: 810 - DNA, 1449 bp, Artificial Sequence
  source: /note="Description of Artificial Sequence: Synthetic polynucleotide"
atggccctccctgtcaccgccctgctgcttccgctggctcttctgctccacgccgctcggccccaagtgcaactcgtggaatctggtggaggactcgtgaaacctggaggatcattgagactgtcatgcgcggcctcgggattcacgttctccgattactacatgagctggattcgccaggctccggggaagggactggaatgggtgtcctacatttcctcatccggctccaccatctactacgcggactccgtgaaggggagattcaccattagccgcgataacgccaagaacagcctgtaccttcagatgaactccctgcgggctgaagatactgccgtctactactgcgcaagggagagcggagatgggatggacgtctggggacagggtaccactgtgaccgtgtcgtcggcctccggcggagggggttcgggtggaagggccagcggcggcggaggcagcgacatccagatgacccagtccccctcatcgctgtccgcctccgtgggcgaccgcgtcaccatcacatgccgggcctcacagtcgatctcctcctacctcaattggtatcagcagaagcccggaaaggcccctaagcttctgatctacgcagcgtcctccctgcaatccggggtcccatctcggttctccggctcgggcagcggtaccgacttcactctgaccatctcgagcctgcagccggaggacttcgccacttactactgtcagcaaagctacaccctcgcgtttggccagggcaccaaagtggacatcaagaccactaccccagcaccgaggccacccaccccggctcctaccatcgcctcccagcctctgtccctgcgtccggaggcatgtagacccgcagctggtggggccgtgcatacccggggtcttgacttcgcctgcgatatctacatttgggcccctctggctggtacttgcggggtcctgctgctttcactcgtgatcactctttactgtaagcgcggtcggaagaagctgctgtacatctttaagcaacccttcatgaggcctgtgcagactactcaagaggaggacggctgttcatgccggttcccagaggaggaggaaggcggctgcgaactgcgcgtgaaattcagccgcagcgcagatgctccagcctacaagcaggggcagaaccagctctacaacgaactcaatcttggtcggagagaggagtacgacgtgctggacaagcggagaggacgggacccagaaatgggcgggaagccgcgcagaaagaatccccaagagggcctgtacaacgagctccaaaaggataagatggcagaagcctatagcgagattggtatgaaaggggaacgcagaagaggcaaaggccacgacggactgtaccagggactcagcaccgccaccaaggacacctatgacgctcttcacatgcaggccctgccgcctcgg

SEQ ID NO: 811 - protein, 490 aa, Artificial Sequence
  source: /note="Description of Artificial Sequence: Synthetic polypeptide"
MALPVTALLLPLALLLHAARPQVQLVQSGGGLVKPGGSLRLSCAASGFTFSDYYMSWIRQAPGKGLEWVSYISSSGNTIYYADSVKGRFTISRDNAKNSLYLQMNSLRAEDTAVYYCARSTMVREDYWGQGTLVTVSSASGGGGSGGRASGGGGSDIVLTQSPLSLPVTLGQPASISCKSSESLVHNSGKTYLNWFHQRPGQSPRRLIYEVSNRDSGVPDRFTGSGSGTDFTLKISRVEAEDVGVYYCMQGTHWPGTFGQGTKLEIKTTTPAPRPPTPAPTIASQPLSLRPEACRPAAGGAVHTRGLDFACDIYIWAPLAGTCGVLLLSLVITLYCKRGRKKLLYIFKQPFMRPVQTTQEEDGCSCRFPEEEEGGCELRVKFSRSADAPAYKQGQNQLYNELNLGRREEYDVLDKRRGRDPEMGGKPRRKNPQEGLYNELQKDKMAEAYSEIGMKGERRRGKGHDGLYQGLSTATKDTYDALHMQALPPR

SEQ ID NO: 812 - DNA, 1470 bp, Artificial Sequence
  source: /note="Description of Artificial Sequence: Synthetic polynucleotide"
atggccctccctgtcaccgccctgctgcttccgctggctcttctgctccacgccgctcggccccaagtgcaactggtgcaaagcggaggaggattggtcaaacccggaggaagcctgagactgtcatgcgcggcctctggattcaccttctccgattactacatgtcatggatcagacaggccccggggaagggcctcgaatgggtgtcctacatctcgtcctccgggaacaccatctactacgccgacagcgtgaagggccgctttaccatttcccgcgacaacgcaaagaactcgctgtaccttcagatgaattccctgcgggctgaagataccgcggtgtactattgcgcccggtccactatggtccgggaggactactggggacagggcacactcgtgaccgtgtccagcgcgagcgggggtggaggcagcggtggacgcgcctccggcggcggcggttcagacatcgtgctgactcagtcgcccctgtcgctgccggtcaccctgggccaaccggcctcaattagctgcaagtcctcggagagcctggtgcacaactcaggaaagacttacctgaactggttccatcagcggcctggacagtccccacggaggctcatctatgaagtgtccaacagggattcgggggtgcccgaccgcttcactggctccgggtccggcaccgacttcaccttgaaaatctccagagtggaagccgaggacgtgggcgtgtactactgtatgcagggtacccactggcctggaacctttggacaaggaactaagctcgagattaagaccactaccccagcaccgaggccacccaccccggctcctaccatcgcctcccagcctctgtccctgcgtccggaggcatgtagacccgcagctggtggggccgtgcatacccggggtcttgacttcgcctgcgatatctacatttgggcccctctggctggtacttgcggggtcctgctgctttcactcgtgatcactctttactgtaagcgcggtcggaagaagctgctgtacatctttaagcaacccttcatgaggcctgtgcagactactcaagaggaggacggctgttcatgccggttcccagaggaggaggaaggcggctgcgaactgcgcgtgaaattcagccgcagcgcagatgctccagcctacaagcaggggcagaaccagctctacaacgaactcaatcttggtcggagagaggagtacgacgtgctggacaagcggagaggacgggacccagaaatgggcgggaagccgcgcagaaagaatccccaagagggcctgtacaacgagctccaaaaggataagatggcagaagcctatagcgagattggtatgaaaggggaacgcagaagaggcaaaggccacgacggactgtaccagggactcagcaccgccaccaaggacacctatgacgctcttcacatgcaggccctgccgcctcgg

SEQ ID NO: 813 - protein, 483 aa, Artificial Sequence
  source: /note="Description of Artificial Sequence: Synthetic polypeptide"
MALPVTALLLPLALLLHAARPQVQLVESGGGLVQPGGSLRLSCAVSGFALSNHGMSWVRRAPGKGLEWVSGIVYSGSTYYAASVKGRFTISRDNSRNTLYLQMNSLRPEDTAIYYCSAHGGESDVWGQGTTVTVSSASGGGGSGGRASGGGGSDIRLTQSPSPLSASVGDRVTITCQASEDINKFLNWYHQTPGKAPKLLIYDASTLQTGVPSRFSGSGSGTDFTLTINSLQPEDIGTYYCQQYESLPLTFGGGTKVEIKTTTPAPRPPTPAPTIASQPLSLRPEACRPAAGGAVHTRGLDFACDIYIWAPLAGTCGVLLLSLVITLYCKRGRKKLLYIFKQPFMRPVQTTQEEDGCSCRFPEEEEGGCELRVKFSRSADAPAYKQGQNQLYNELNLGRREEYDVLDKRRGRDPEMGGKPRRKNPQEGLYNELQKDKMAEAYSEIGMKGERRRGKGHDGLYQGLSTATKDTYDALHMQALPPR

SEQ ID NO: 814 - DNA, 1449 bp, Artificial Sequence
  source: /note="Description of Artificial Sequence: Synthetic polynucleotide"
atggccctccctgtcaccgccctgctgcttccgctggctcttctgctccacgccgctcggccccaagtgcaactcgtggaatctggtggaggactcgtgcaacccggtggaagccttaggctgtcgtgcgccgtcagcgggtttgctctgagcaaccatggaatgtcctgggtccgccgggcaccgggaaaagggctggaatgggtgtccggcatcgtgtacagcgggtcaacctattacgccgcgtccgtgaagggcagattcactatctcaagagacaacagccggaacaccctgtacttgcaaatgaattccctgcgccccgaggacaccgccatctactactgctccgcccacggaggagagtcggacgtgtggggccagggaacgactgtgactgtgtccagcgcatcaggagggggtggttcgggcggccgggcctcggggggaggaggttccgacattcggctgacccagtccccgtccccactgtcggcctccgtcggcgaccgcgtgaccatcacttgtcaggcgtccgaggacattaacaagttcctgaactggtaccaccagacccctggaaaggcccccaagctgctgatctacgatgcctcgacccttcaaactggagtgcctagccggttctccgggtccggctccggcactgatttcactctgaccatcaactcattgcagccggaagatatcgggacctactattgccagcagtacgaatccctcccgctcacattcggcgggggaaccaaggtcgagattaagaccactaccccagcaccgaggccacccaccccggctcctaccatcgcctcccagcctctgtccctgcgtccggaggcatgtagacccgcagctggtggggccgtgcatacccggggtcttgacttcgcctgcgatatctacatttgggcccctctggctggtacttgcggggtcctgctgctttcactcgtgatcactctttactgtaagcgcggtcggaagaagctgctgtacatctttaagcaacccttcatgaggcctgtgcagactactcaagaggaggacggctgttcatgccggttcccagaggaggaggaaggcggctgcgaactgcgcgtgaaattcagccgcagcgcagatgctccagcctacaagcaggggcagaaccagctctacaacgaactcaatcttggtcggagagaggagtacgacgtgctggacaagcggagaggacgggacccagaaatgggcgggaagccgcgcagaaagaatccccaagagggcctgtacaacgagctccaaaaggataagatggcagaagcctatagcgagattggtatgaaaggggaacgcagaagaggcaaaggccacgacggactgtaccagggactcagcaccgccaccaaggacacctatgacgctcttcacatgcaggccctgccgcctcgg

SEQ ID NO: 815 - protein, 484 aa, Artificial Sequence
  source: /note="Description of Artificial Sequence: Synthetic polypeptide"
MALPVTALLLPLALLLHAARPEVQLVETGGGLVQPGGSLRLSCAVSGFALSNHGMSWVRRAPGKGLEWVSGIVYSGSTYYAASVKGRFTISRDNSRNTLYLQMNSLRPEDTAIYYCSAHGGESDVWGQGTTVTVSSASGGGGSGGRASGGGGSETTLTQSPATLSVSPGERATLSCRASQSVGSNLAWYQQKPGQGPRLLIYGASTRATGIPARFSGSGSGTEFTLTISSLQPEDFAVYYCQQYNDWLPVTFGQGTKVEIKTTTPAPRPPTPAPTIASQPLSLRPEACRPAAGGAVHTRGLDFACDIYIWAPLAGTCGVLLLSLVITLYCKRGRKKLLYIFKQPFMRPVQTTQEEDGCSCRFPEEEEGGCELRVKFSRSADAPAYKQGQNQLYNELNLGRREEYDVLDKRRGRDPEMGGKPRRKNPQEGLYNELQKDKMAEAYSEIGMKGERRRGKGHDGLYQGLSTATKDTYDALHMQALPPR

SEQ ID NO: 816 - DNA, 1452 bp, Artificial Sequence
  source: /note="Description of Artificial Sequence: Synthetic polynucleotide"
atggccctccctgtcaccgccctgctgcttccgctggctcttctgctccacgccgctcggcccgaagtgcaattggtggaaactggaggaggacttgtgcaacctggaggatcattgcggctctcatgcgctgtctccggcttcgccctgtcaaatcacgggatgtcgtgggtcagacgggccccgggaaagggtctggaatgggtgtcggggattgtgtacagcggctccacctactacgccgcttcggtcaagggccgcttcactatttcacgggacaacagccgcaacaccctctatctgcaaatgaactctctccgcccggaggataccgccatctactactgctccgcacacggcggcgaatccgacgtgtggggacagggaaccactgtcaccgtgtcgtccgcatccggtggcggaggatcgggtggccgggcctccgggggcggcggcagcgagactaccctgacccagtcccctgccactctgtccgtgagcccgggagagagagccacccttagctgccgggccagccagagcgtgggctccaacctggcctggtaccagcagaagccaggacagggtcccaggctgctgatctacggagcctccactcgcgcgaccggcatccccgcgaggttctccgggtcgggttccgggaccgagttcaccctgaccatctcctccctccaaccggaggacttcgcggtgtactactgtcagcagtacaacgattggctgcccgtgacatttggacaggggacgaaggtggaaatcaaaaccactaccccagcaccgaggccacccaccccggctcctaccatcgcctcccagcctctgtccctgcgtccggaggcatgtagacccgcagctggtggggccgtgcatacccggggtcttgacttcgcctgcgatatctacatttgggcccctctggctggtacttgcggggtcctgctgctttcactcgtgatcactctttactgtaagcgcggtcggaagaagctgctgtacatctttaagcaacccttcatgaggcctgtgcagactactcaagaggaggacggctgttcatgccggttcccagaggaggaggaaggcggctgcgaactgcgcgtgaaattcagccgcagcgcagatgctccagcctacaagcaggggcagaaccagctctacaacgaactcaatcttggtcggagagaggagtacgacgtgctggacaagcggagaggacgggacccagaaatgggcgggaagccgcgcagaaagaatccccaagagggcctgtacaacgagctccaaaaggataagatggcagaagcctatagcgagattggtatgaaaggggaacgcagaagaggcaaaggccacgacggactgtaccagggactcagcaccgccaccaaggacacctatgacgctcttcacatgcaggccctgccgcctcgg

SEQ ID NO: 817 - protein, 485 aa, Artificial Sequence
  source: /note="Description of Artificial Sequence: Synthetic polypeptide"
MALPVTALLLPLALLLHAARPEVQLVESGGGLVQPGGSLRLSCAVSGFALSNHGMSWVRRAPGKGLEWVSGIVYSGSTYYAASVKGRFTISRDNSRNTLYLQMNSLRPEDTAIYYCSAHGGESDVWGQGTTVTVSSASGGGGSGGRASGGGGSEIVLTQSPGTLSLSPGERATLSCRASQSIGSSSLAWYQQKPGQAPRLLMYGASSRASGIPDRFSGSGSGTDFTLTISRLEPEDFAVYYCQQYAGSPPFTFGQGTKVEIKTTTPAPRPPTPAPTIASQPLSLRPEACRPAAGGAVHTRGLDFACDIYIWAPLAGTCGVLLLSLVITLYCKRGRKKLLYIFKQPFMRPVQTTQEEDGCSCRFPEEEEGGCELRVKFSRSADAPAYKQGQNQLYNELNLGRREEYDVLDKRRGRDPEMGGKPRRKNPQEGLYNELQKDKMAEAYSEIGMKGERRRGKGHDGLYQGLSTATKDTYDALHMQALPPR

SEQ ID NO: 818 - DNA, 1455 bp, Artificial Sequence
  source: /note="Description of Artificial Sequence: Synthetic polynucleotide"
atggccctccctgtcaccgccctgctgcttccgctggctcttctgctccacgccgctcggcccgaagtgcaattggtggaatctggtggaggacttgtgcaacctggaggatcactgagactgtcatgcgcggtgtccggttttgccctgagcaatcatgggatgtcgtgggtccggcgcgcccccggaaagggtctggaatgggtgtcgggtatcgtctactccgggagcacttactacgccgcgagcgtgaagggccgcttcaccatttcccgcgataactcccgcaacaccctgtacttgcaaatgaactcgctccggcctgaggacactgccatctactactgctccgcacacggaggagaatccgacgtgtggggccagggaactaccgtgaccgtcagcagcgcctccggcggcgggggctcaggcggacgggctagcggcggcggtggctccgagatcgtgctgacccagtcgcctggcactctctcgctgagccccggggaaagggcaaccctgtcctgtcgggccagccagtccattggatcatcctccctcgcctggtatcagcagaaaccgggacaggctccgcggctgcttatgtatggggccagctcaagagcctccggcattcccgaccggttctccgggtccggttccggcaccgatttcaccctgactatctcgaggctggagccagaggacttcgccgtgtactactgccagcagtacgcggggtccccgccgttcacgttcggacagggaaccaaggtcgagatcaagaccactaccccagcaccgaggccacccaccccggctcctaccatcgcctcccagcctctgtccctgcgtccggaggcatgtagacccgcagctggtggggccgtgcatacccggggtcttgacttcgcctgcgatatctacatttgggcccctctggctggtacttgcggggtcctgctgctttcactcgtgatcactctttactgtaagcgcggtcggaagaagctgctgtacatctttaagcaacccttcatgaggcctgtgcagactactcaagaggaggacggctgttcatgccggttcccagaggaggaggaaggcggctgcgaactgcgcgtgaaattcagccgcagcgcagatgctccagcctacaagcaggggcagaaccagctctacaacgaactcaatcttggtcggagagaggagtacgacgtgctggacaagcggagaggacgggacccagaaatgggcgggaagccgcgcagaaagaatccccaagagggcctgtacaacgagctccaaaaggataagatggcagaagcctatagcgagattggtatgaaaggggaacgcagaagaggcaaaggccacgacggactgtaccagggactcagcaccgccaccaaggacacctatgacgctcttcacatgcaggccctgccgcctcgg

SEQ ID NO: 819 - protein, 487 aa, Artificial Sequence
  source: /note="Description of Artificial Sequence: Synthetic polypeptide"
MALPVTALLLPLALLLHAARPQVQLQESGPGLVKPSETLSLTCTVSGGSISSSYYYWGWIRQPPGKGLEWIGSIYYSGSAYYNPSLKSRVTISVDTSKNQFSLRLSSVTAADTAVYYCARHWQEWPDAFDIWGQGTMVTVSSGGGGSGGGGSGGGGSETTLTQSPAFMSATPGDKVIISCKASQDIDDAMNWYQQKPGEAPLFIIQSATSPVPGIPPRFSGSGFGTDFSLTINNIESEDAAYYFCLQHDNFPLTFGQGTKLEIKTTTPAPRPPTPAPTIASQPLSLRPEACRPAAGGAVHTRGLDFACDIYIWAPLAGTCGVLLLSLVITLYCKRGRKKLLYIFKQPFMRPVQTTQEEDGCSCRFPEEEEGGCELRVKFSRSADAPAYKQGQNQLYNELNLGRREEYDVLDKRRGRDPEMGGKPRRKNPQEGLYNELQKDKMAEAYSEIGMKGERRRGKGHDGLYQGLSTATKDTYDALHMQALPPR

SEQ ID NO: 820 - DNA, 1461 bp, Artificial Sequence
  source: /note="Description of Artificial Sequence: Synthetic polynucleotide"
atggccctccctgtcaccgccctgctgcttccgctggctcttctgctccacgccgctcggccccaagtgcagcttcaggaaagcggaccgggcctggtcaagccatccgaaactctctccctgacttgcactgtgtctggcggttccatctcatcgtcgtactactactggggctggattaggcagccgcccggaaagggactggagtggatcggaagcatctactattccggctcggcgtactacaaccctagcctcaagtcgagagtgaccatctccgtggatacctccaagaaccagttttccctgcgcctgagctccgtgaccgccgctgacaccgccgtgtactactgtgctcggcattggcaggaatggcccgatgccttcgacatttggggccagggcactatggtcactgtgtcatccgggggtggaggcagcgggggaggagggtccggggggggaggttcagagacaaccttgacccagtcacccgcattcatgtccgccactccgggagacaaggtcatcatctcgtgcaaagcgtcccaggatatcgacgatgccatgaattggtaccagcagaagcctggcgaagcgccgctgttcattatccaatccgcaacctcgcccgtgcctggaatcccaccgcggttcagcggcagcggtttcggaaccgacttttccctgaccattaacaacattgagtccgaggacgccgcctactacttctgcctgcaacacgacaacttccctctcacgttcggccagggaaccaagctggaaatcaagaccactaccccagcaccgaggccacccaccccggctcctaccatcgcctcccagcctctgtccctgcgtccggaggcatgtagacccgcagctggtggggccgtgcatacccggggtcttgacttcgcctgcgatatctacatttgggcccctctggctggtacttgcggggtcctgctgctttcactcgtgatcactctttactgtaagcgcggtcggaagaagctgctgtacatctttaagcaacccttcatgaggcctgtgcagactactcaagaggaggacggctgttcatgccggttcccagaggaggaggaaggcggctgcgaactgcgcgtgaaattcagccgcagcgcagatgctccagcctacaagcaggggcagaaccagctctacaacgaactcaatcttggtcggagagaggagtacgacgtgctggacaagcggagaggacgggacccagaaatgggcgggaagccgcgcagaaagaatccccaagagggcctgtacaacgagctccaaaaggataagatggcagaagcctatagcgagattggtatgaaaggggaacgcagaagaggcaaaggccacgacggactgtaccagggactcagcaccgccaccaaggacacctatgacgctcttcacatgcaggccctgccgcctcgg

SEQ ID NO: 821 - protein, 489 aa, Artificial Sequence
  source: /note="Description of Artificial Sequence: Synthetic polypeptide"
MALPVTALLLPLALLLHAARPQVNLRESGPALVKPTQTLTLTCTFSGFSLRTSGMCVSWIRQPPGKALEWLARIDWDEDKFYSTSLKTRLTISKDTSDNQVVLRMTNMDPADTATYYCARSGAGGTSATAFDIWGPGTMVTVSSGGGGSGGGGSGGGGSDIQMTQSPSSLSASVGDRVTITCRASQDIYNNLAWFQLKPGSAPRSLMYAANKSQSGVPSRFSGSASGTDFTLTISSLQPEDFATYYCQHYYRFPYSFGQGTKLEIKTTTPAPRPPTPAPTIASQPLSLRPEACRPAAGGAVHTRGLDFACDIYIWAPLAGTCGVLLLSLVITLYCKRGRKKLLYIFKQPFMRPVQTTQEEDGCSCRFPEEEEGGCELRVKFSRSADAPAYKQGQNQLYNELNLGRREEYDVLDKRRGRDPEMGGKPRRKNPQEGLYNELQKDKMAEAYSEIGMKGERRRGKGHDGLYQGLSTATKDTYDALHMQALPPR

SEQ ID NO: 822 - DNA, 1467 bp, Artificial Sequence
  source: /note="Description of Artificial Sequence: Synthetic polynucleotide"
atggccctccctgtcaccgccctgctgcttccgctggctcttctgctccacgccgctcggccccaagtcaatctgcgcgaatccggccccgccttggtcaagcctacccagaccctcactctgacctgtactttctccggcttctccctgcggacttccgggatgtgcgtgtcctggatcagacagcctccgggaaaggccctggagtggctcgctcgcattgactgggatgaggacaagttctactccacctcactcaagaccaggctgaccatcagcaaagatacctctgacaaccaagtggtgctccgcatgaccaacatggacccagccgacactgccacttactactgcgcgaggagcggagcgggcggaacctccgccaccgccttcgatatttggggcccgggtaccatggtcaccgtgtcaagcggaggaggggggtccgggggcggcggttccgggggaggcggatcggacattcagatgactcagtcaccatcgtccctgagcgctagcgtgggcgacagagtgacaatcacttgccgggcatcccaggacatctataacaaccttgcgtggttccagctgaagcctggttccgcaccgcggtcacttatgtacgccgccaacaagagccagtcgggagtgccgtcccggttttccggttcggcctcgggaactgacttcaccctgacgatctccagcctgcaacccgaggatttcgccacctactactgccagcactactaccgctttccctactcgttcggacagggaaccaagctggaaatcaagaccactaccccagcaccgaggccacccaccccggctcctaccatcgcctcccagcctctgtccctgcgtccggaggcatgtagacccgcagctggtggggccgtgcatacccggggtcttgacttcgcctgcgatatctacatttgggcccctctggctggtacttgcggggtcctgctgctttcactcgtgatcactctttactgtaagcgcggtcggaagaagctgctgtacatctttaagcaacccttcatgaggcctgtgcagactactcaagaggaggacggctgttcatgccggttcccagaggaggaggaaggcggctgcgaactgcgcgtgaaattcagccgcagcgcagatgctccagcctacaagcaggggcagaaccagctctacaacgaactcaatcttggtcggagagaggagtacgacgtgctggacaagcggagaggacgggacccagaaatgggcgggaagccgcgcagaaagaatccccaagagggcctgtacaacgagctccaaaaggataagatggcagaagcctatagcgagattggtatgaaaggggaacgcagaagaggcaaaggccacgacggactgtaccagggactcagcaccgccaccaaggacacctatgacgctcttcacatgcaggccctgccgcctcgg

SEQ ID NO: 823 - protein, 490 aa, Artificial Sequence
  source: /note="Description of Artificial Sequence: Synthetic polypeptide"
MALPVTALLLPLALLLHAARPEVQLVESGGGLVKPGGSLRLSCAASGFTFSSYSMNWVRQAPGKGLEWVSSISSSSSYIYYADSVKGRFTISRDNAKNSLYLQMNSLRAEDTAVYYCAKTIAAVYAFDIWGQGTTVTVSSGGGGSGGGGSGGGGSEIVLTQSPLSLPVTPEEPASISCRSSQSLLHSNGYNYLDWYLQKPGQSPQLLIYLGSNRASGVPDRFSGSGSGTDFTLKISRVEAEDVGVYYCMQALQTPYTFGQGTKLEIKTTTPAPRPPTPAPTIASQPLSLRPEACRPAAGGAVHTRGLDFACDIYIWAPLAGTCGVLLLSLVITLYCKRGRKKLLYIFKQPFMRPVQTTQEEDGCSCRFPEEEEGGCELRVKFSRSADAPAYKQGQNQLYNELNLGRREEYDVLDKRRGRDPEMGGKPRRKNPQEGLYNELQKDKMAEAYSEIGMKGERRRGKGHDGLYQGLSTATKDTYDALHMQALPPR

SEQ ID NO: 824 - DNA, 1470 bp, Artificial Sequence
  source: /note="Description of Artificial Sequence: Synthetic polynucleotide"
atggccctccctgtcaccgccctgctgcttccgctggctcttctgctccacgccgctcggcccgaagtgcagcttgtcgaatccggggggggactggtcaagccgggcggatcactgagactgtcctgcgccgcgagcggcttcacgttctcctcctactccatgaactgggtccgccaagcccccgggaagggactggaatgggtgtcctctatctcctcgtcgtcgtcctacatctactacgccgactccgtgaagggaagattcaccatttcccgcgacaacgcaaagaactcactgtacttgcaaatgaactcactccgggccgaagatactgctgtgtactattgcgccaagactattgccgccgtctacgctttcgacatctggggccagggaaccaccgtgactgtgtcgtccggtggtggtggctcgggcggaggaggaagcggcggcggggggtccgagattgtgctgacccagtcgccactgagcctccctgtgacccccgaggaacccgccagcatcagctgccggtccagccagtccctgctccactccaacggatacaattacctcgattggtaccttcagaagcctggacaaagcccgcagctgctcatctacttgggatcaaaccgcgcgtcaggagtgcctgaccggttctccggctcgggcagcggtaccgatttcaccctgaaaatctccagggtggaggcagaggacgtgggagtgtattactgtatgcaggcgctgcagactccgtacacatttgggcagggcaccaagctggagatcaagaccactaccccagcaccgaggccacccaccccggctcctaccatcgcctcccagcctctgtccctgcgtccggaggcatgtagacccgcagctggtggggccgtgcatacccggggtcttgacttcgcctgcgatatctacatttgggcccctctggctggtacttgcggggtcctgctgctttcactcgtgatcactctttactgtaagcgcggtcggaagaagctgctgtacatctttaagcaacccttcatgaggcctgtgcagactactcaagaggaggacggctgttcatgccggttcccagaggaggaggaaggcggctgcgaactgcgcgtgaaattcagccgcagcgcagatgctccagcctacaagcaggggcagaaccagctctacaacgaactcaatcttggtcggagagaggagtacgacgtgctggacaagcggagaggacgggacccagaaatgggcgggaagccgcgcagaaagaatccccaagagggcctgtacaacgagctccaaaaggataagatggcagaagcctatagcgagattggtatgaaaggggaacgcagaagaggcaaaggccacgacggactgtaccagggactcagcaccgccaccaaggacacctatgacgctcttcacatgcaggccctgccgcctcgg

SEQ ID NO: 825 - protein, 484 aa, Artificial Sequence
  source: /note="Description of Artificial Sequence: Synthetic polypeptide"
MALPVTALLLPLALLLHAARPEVQLVESGGGLVKPGGSLRLSCAASGFTFSDYYMSWIRQAPGKGLEWVSYISSSGSTIYYADSVKGRFTISRDNAKNSLYLQMNSLRAEDTAVYYCARDLRGAFDIWGQGTMVTVSSGGGGSGGGGSGGGGSSYVLTQSPSVSAAPGYTATISCGGNNIGTKSVHWYQQKPGQAPLLVIRDDSVRPSKIPGRFSGSNSGNMATLTISGVQAGDEADFYCQVWDSDSEHVVFGGGTKLTVLTTTPAPRPPTPAPTIASQPLSLRPEACRPAAGGAVHTRGLDFACDIYIWAPLAGTCGVLLLSLVITLYCKRGRKKLLYIFKQPFMRPVQTTQEEDGCSCRFPEEEEGGCELRVKFSRSADAPAYKQGQNQLYNELNLGRREEYDVLDKRRGRDPEMGGKPRRKNPQEGLYNELQKDKMAEAYSEIGMKGERRRGKGHDGLYQGLSTATKDTYDALHMQALPPR

SEQ ID NO: 826 - DNA, 1452 bp, Artificial Sequence
  source: /note="Description of Artificial Sequence: Synthetic polynucleotide"
atggccctccctgtcaccgccctgctgcttccgctggctcttctgctccacgccgctcggcccgaagtccagctcgtggagtccggcggaggccttgtgaagcctggaggttcgctgagactgtcctgcgccgcctccggcttcaccttctccgactactacatgtcctggatcagacaggccccgggaaagggcctggaatgggtgtcctacatctcgtcatcgggcagcactatctactacgcggactcagtgaaggggcggttcaccatttcccgggataacgcgaagaactcgctgtatctgcaaatgaactcactgagggccgaggacaccgccgtgtactactgcgcccgcgatctccgcggggcatttgacatctggggacagggaaccatggtcacagtgtccagcggagggggaggatcgggtggcggaggttccgggggtggaggctcctcctacgtgctgactcagagcccaagcgtcagcgctgcgcccggttacacggcaaccatctcctgtggcggaaacaacattgggaccaagtctgtgcactggtatcagcagaagccgggccaagctcccctgttggtgatccgcgatgactccgtgcggcctagcaaaattccgggacggttctccggctccaacagcggcaatatggccactctcaccatctcgggagtgcaggccggagatgaagccgacttctactgccaagtctgggactcagactccgagcatgtggtgttcgggggcggaaccaagctgactgtgctcaccactaccccagcaccgaggccacccaccccggctcctaccatcgcctcccagcctctgtccctgcgtccggaggcatgtagacccgcagctggtggggccgtgcatacccggggtcttgacttcgcctgcgatatctacatttgggcccctctggctggtacttgcggggtcctgctgctttcactcgtgatcactctttactgtaagcgcggtcggaagaagctgctgtacatctttaagcaacccttcatgaggcctgtgcagactactcaagaggaggacggctgttcatgccggttcccagaggaggaggaaggcggctgcgaactgcgcgtgaaattcagccgcagcgcagatgctccagcctacaagcaggggcagaaccagctctacaacgaactcaatcttggtcggagagaggagtacgacgtgctggacaagcggagaggacgggacccagaaatgggcgggaagccgcgcagaaagaatccccaagagggcctgtacaacgagctccaaaaggataagatggcagaagcctatagcgagattggtatgaaaggggaacgcagaagaggcaaaggccacgacggactgtaccagggactcagcaccgccaccaaggacacctatgacgctcttcacatgcaggccctgccgcctcgg

SEQ ID NO: 827 - protein, 485 aa, Artificial Sequence
  source: /note="Description of Artificial Sequence: Synthetic polypeptide"
MALPVTALLLPLALLLHAARPQVQLVQSGAEVKKPGASVKVSCKPSGYTVTSHYIHWVRRAPGQGLEWMGMINPSGGVTAYSQTLQGRVTMTSDTSSSTVYMELSSLRSEDTAMYYCAREGSGSGWYFDFWGRGTLVTVSSGGGGSGGGGSGGGGSSYVLTQPPSVSVSPGQTASITCSGDGLSKKYVSWYQQKAGQSPVVLISRDKERPSGIPDRFSGSNSADTATLTISGTQAMDEADYYCQAWDDTTVVFGGGTKLTVLTTTPAPRPPTPAPTIASQPLSLRPEACRPAAGGAVHTRGLDFACDIYIWAPLAGTCGVLLLSLVITLYCKRGRKKLLYIFKQPFMRPVQTTQEEDGCSCRFPEEEEGGCELRVKFSRSADAPAYKQGQNQLYNELNLGRREEYDVLDKRRGRDPEMGGKPRRKNPQEGLYNELQKDKMAEAYSEIGMKGERRRGKGHDGLYQGLSTATKDTYDALHMQALPPR

SEQ ID NO: 828 - DNA, 1455 bp, Artificial Sequence
  source: /note="Description of Artificial Sequence: Synthetic polynucleotide"
atggccctccctgtcaccgccctgctgcttccgctggctcttctgctccacgccgctcggccccaagtgcagctggtgcagagcggggccgaagtcaagaagccgggagcctccgtgaaagtgtcctgcaagccttcgggatacaccgtgacctcccactacattcattgggtccgccgcgcccccggccaaggactcgagtggatgggcatgatcaaccctagcggcggagtgaccgcgtacagccagacgctgcagggacgcgtgactatgacctcggatacctcctcctccaccgtctatatggaactgtccagcctgcggtccgaggataccgccatgtactactgcgcccgggaaggatcaggctccgggtggtatttcgacttctggggaagaggcaccctcgtgactgtgtcatctgggggagggggttccggtggtggcggatcgggaggaggcggttcatcctacgtgctgacccagccaccctccgtgtccgtgagccccggccagactgcatcgattacatgtagcggcgacggcctctccaagaaatacgtgtcgtggtaccagcagaaggccggacagagcccggtggtgctgatctcaagagataaggagcggcctagcggaatcccggacaggttctcgggttccaactccgcggacactgctactctgaccatctcggggacccaggctatggacgaagccgattactactgccaagcctgggacgacactactgtcgtgtttggagggggcaccaagttgaccgtccttaccactaccccagcaccgaggccacccaccccggctcctaccatcgcctcccagcctctgtccctgcgtccggaggcatgtagacccgcagctggtggggccgtgcatacccggggtcttgacttcgcctgcgatatctacatttgggcccctctggctggtacttgcggggtcctgctgctttcactcgtgatcactctttactgtaagcgcggtcggaagaagctgctgtacatctttaagcaacccttcatgaggcctgtgcagactactcaagaggaggacggctgttcatgccggttcccagaggaggaggaaggcggctgcgaactgcgcgtgaaattcagccgcagcgcagatgctccagcctacaagcaggggcagaaccagctctacaacgaactcaatcttggtcggagagaggagtacgacgtgctggacaagcggagaggacgggacccagaaatgggcgggaagccgcgcagaaagaatccccaagagggcctgtacaacgagctccaaaaggataagatggcagaagcctatagcgagattggtatgaaaggggaacgcagaagaggcaaaggccacgacggactgtaccagggactcagcaccgccaccaaggacacctatgacgctcttcacatgcaggccctgccgcctcgg

SEQ ID NO: 829 - protein, 489 aa, Artificial Sequence
  source: /note="Description of Artificial Sequence: Synthetic polypeptide"
MALPVTALLLPLALLLHAARPQVQLQESGPGLVKPSQTLSLTCTVSGGSISSGGYYWSWIRQHPGKGLEWIGYIYYSGSTYYNPSLKSRVTISVDTSKNQFSLKLSSVTAADTAVYYCARAGIAARLRGAFDIWGQGTMVTVSSGGGGSGGGGSGGGGSDIVMTQSPSSVSASVGDRVIITCRASQGIRNWLAWYQQKPGKAPNLLIYAASNLQSGVPSRFSGSGSGADFTLTISSLQPEDVATYYCQKYNSAPFTFGPGTKVDIKTTTPAPRPPTPAPTIASQPLSLRPEACRPAAGGAVHTRGLDFACDIYIWAPLAGTCGVLLLSLVITLYCKRGRKKLLYIFKQPFMRPVQTTQEEDGCSCRFPEEEEGGCELRVKFSRSADAPAYKQGQNQLYNELNLGRREEYDVLDKRRGRDPEMGGKPRRKNPQEGLYNELQKDKMAEAYSEIGMKGERRRGKGHDGLYQGLSTATKDTYDALHMQALPPR

SEQ ID NO: 830 - DNA, 1467 bp, Artificial Sequence
  source: /note="Description of Artificial Sequence: Synthetic polynucleotide"
atggccctccctgtcaccgccctgctgcttccgctggctcttctgctccacgccgctcggccccaagtgcagcttcaggagagcggcccgggactcgtgaagccgtcccagaccctgtccctgacttgcaccgtgtcgggaggaagcatctcgagcggaggctactattggtcgtggattcggcagcaccctggaaagggcctggaatggatcggctacatctactactccggctcgacctactacaacccatcgctgaagtccagagtgacaatctcagtggacacgtccaagaatcagttcagcctgaagctctcttccgtgactgcggccgacaccgccgtgtactactgcgcacgcgctggaattgccgcccggctgaggggtgccttcgacatttggggacagggcaccatggtcaccgtgtcctccggcggcggaggttccgggggtggaggctcaggaggaggggggtccgacatcgtcatgactcagtcgccctcaagcgtcagcgcgtccgtcggggacagagtgatcatcacctgtcgggcgtcccagggaattcgcaactggctggcctggtatcagcagaagcccggaaaggcccccaacctgttgatctacgccgcctcaaacctccaatccggggtgccgagccgcttcagcggctccggttcgggtgccgatttcactctgaccatctcctccctgcaacctgaagatgtggctacctactactgccaaaagtacaactccgcaccttttactttcggaccggggaccaaagtggacattaagaccactaccccagcaccgaggccacccaccccggctcctaccatcgcctcccagcctctgtccctgcgtccggaggcatgtagacccgcagctggtggggccgtgcatacccggggtcttgacttcgcctgcgatatctacatttgggcccctctggctggtacttgcggggtcctgctgctttcactcgtgatcactctttactgtaagcgcggtcggaagaagctgctgtacatctttaagcaacccttcatgaggcctgtgcagactactcaagaggaggacggctgttcatgccggttcccagaggaggaggaaggcggctgcgaactgcgcgtgaaattcagccgcagcgcagatgctccagcctacaagcaggggcagaaccagctctacaacgaactcaatcttggtcggagagaggagtacgacgtgctggacaagcggagaggacgggacccagaaatgggcgggaagccgcgcagaaagaatccccaagagggcctgtacaacgagctccaaaaggataagatggcagaagcctatagcgagattggtatgaaaggggaacgcagaagaggcaaaggccacgacggactgtaccagggactcagcaccgccaccaaggacacctatgacgctcttcacatgcaggccctgccgcctcgg

SEQ ID NO: 831 - protein, 497 aa, Artificial Sequence
  source: /note="Description of Artificial Sequence: Synthetic polypeptide"
MALPVTALLLPLALLLHAARPQVQLVQSGAEVKKPGSSVKVSCKASGGTFSSYAISWVRQAPGQGLEWMGGIIPIFGTANYAQKFQGRVTITADESTSTAYMELSSLRSEDTAVYYCARRGGYQLLRWDVGLLRSAFDIWGQGTMVTVSSGGGGSGGGGSGGGGSSYVLTQPPSVSVAPGQTARITCGGNNIGSKSVHWYQQKPGQAPVLVLYGKNNRPSGVPDRFSGSRSGTTASLTITGAQAEDEADYYCSSRDSSGDHLRVFGTGTKVTVLTTTPAPRPPTPAPTIASQPLSLRPEACRPAAGGAVHTRGLDFACDIYIWAPLAGTCGVLLLSLVITLYCKRGRKKLLYIFKQPFMRPVQTTQEEDGCSCRFPEEEEGGCELRVKFSRSADAPAYKQGQNQLYNELNLGRREEYDVLDKRRGRDPEMGGKPRRKNPQEGLYNELQKDKMAEAYSEIGMKGERRRGKGHDGLYQGLSTATKDTYDALHMQALPPR

SEQ ID NO: 832 - DNA, 1491 bp, Artificial Sequence
  source: /note="Description of Artificial Sequence: Synthetic polynucleotide"
atggccctccctgtcaccgccctgctgcttccgctggctcttctgctccacgccgctcggccccaagtgcagctggtccagtcgggcgccgaggtcaagaagcccgggagctctgtgaaagtgtcctgcaaggcctccgggggcacctttagctcctacgccatctcctgggtccgccaagcaccgggtcaaggcctggagtggatggggggaattatccctatcttcggcactgccaactacgcccagaagttccagggacgcgtgaccattaccgcggacgaatccacctccaccgcttatatggagctgtccagcttgcgctcggaagataccgccgtgtactactgcgcccggaggggtggataccagctgctgagatgggacgtgggcctcctgcggtcggcgttcgacatctggggccagggcactatggtcactgtgtccagcggaggaggcggatcgggaggcggcggatcagggggaggcggttccagctacgtgcttactcaacccccttcggtgtccgtggccccgggacagaccgccagaatcacttgcggaggaaacaacattgggtccaagagcgtgcattggtaccagcagaagccaggacaggcccctgtgctggtgctctacgggaagaacaatcggcccagcggagtgccggacaggttctcgggttcacgctccggtacaaccgcttcactgactatcaccggggcccaggcagaggatgaagcggactactactgttcctcccgggattcatccggcgaccacctccgggtgttcggaaccggaacgaaggtcaccgtgctgaccactaccccagcaccgaggccacccaccccggctcctaccatcgcctcccagcctctgtccctgcgtccggaggcatgtagacccgcagctggtggggccgtgcatacccggggtcttgacttcgcctgcgatatctacatttgggcccctctggctggtacttgcggggtcctgctgctttcactcgtgatcactctttactgtaagcgcggtcggaagaagctgctgtacatctttaagcaacccttcatgaggcctgtgcagactactcaagaggaggacggctgttcatgccggttcccagaggaggaggaaggcggctgcgaactgcgcgtgaaattcagccgcagcgcagatgctccagcctacaagcaggggcagaaccagctctacaacgaactcaatcttggtcggagagaggagtacgacgtgctggacaagcggagaggacgggacccagaaatgggcgggaagccgcgcagaaagaatccccaagagggcctgtacaacgagctccaaaaggataagatggcagaagcctatagcgagattggtatgaaaggggaacgcagaagaggcaaaggccacgacggactgtaccagggactcagcaccgccaccaaggacacctatgacgctcttcacatgcaggccctgccgcctcgg

SEQ ID NO: 833 - protein, 492 aa, Artificial Sequence
  source: /note="Description of Artificial Sequence: Synthetic polypeptide"
MALPVTALLLPLALLLHAARPEVQLQQSGPGLVKPSQTLSLTCAISGDSVSSNSAAWNWIRQSPSRGLEWLGRTYYRSKWYSFYAISLKSRIIINPDTSKNQFSLQLKSVTPEDTAVYYCARSSPEGLFLYWFDPWGQGTLVTVSSGGDGSGGGGSGGGGSSSELTQDPAVSVALGQTIRITCQGDSLGNYYATWYQQKPGQAPVLVIYGTNNRPSGIPDRFSASSSGNTASLTITGAQAEDEADYYCNSRDSSGHHLLFGTGTKVTVLTTTPAPRPPTPAPTIASQPLSLRPEACRPAAGGAVHTRGLDFACDIYIWAPLAGTCGVLLLSLVITLYCKRGRKKLLYIFKQPFMRPVQTTQEEDGCSCRFPEEEEGGCELRVKFSRSADAPAYKQGQNQLYNELNLGRREEYDVLDKRRGRDPEMGGKPRRKNPQEGLYNELQKDKMAEAYSEIGMKGERRRGKGHDGLYQGLSTATKDTYDALHMQALPPR

SEQ ID NO: 834 - DNA, 1476 bp, Artificial Sequence
  source: /note="Description of Artificial Sequence: Synthetic polynucleotide"
atggccctccctgtcaccgccctgctgcttccgctggctcttctgctccacgccgctcggcccgaagtgcagctccaacagtcaggaccggggctcgtgaagccatcccagaccctgtccctgacttgtgccatctcgggagatagcgtgtcatcgaactccgccgcctggaactggattcggcagagcccgtcccgcggactggagtggcttggaaggacctactaccggtccaagtggtactctttctacgcgatctcgctgaagtcccgcattatcattaaccctgatacctccaagaatcagttctccctccaactgaaatccgtcacccccgaggacacagcagtgtattactgcgcacggagcagccccgaaggactgttcctgtattggtttgacccctggggccaggggactcttgtgaccgtgtcgagcggcggagatgggtccggtggcggtggttcggggggcggcggatcatcatccgaactgacccaggacccggctgtgtccgtggcgctgggacaaaccatccgcattacgtgccagggagactccctgggcaactactacgccacttggtaccagcagaagccgggccaagcccctgtgttggtcatctacgggaccaacaacagaccttccggcatccccgaccggttcagcgcttcgtcctccggcaacactgccagcctgaccatcactggagcgcaggccgaagatgaggccgactactactgcaacagcagagactcctcgggtcatcacctcttgttcggaactggaaccaaggtcaccgtgctgaccactaccccagcaccgaggccacccaccccggctcctaccatcgcctcccagcctctgtccctgcgtccggaggcatgtagacccgcagctggtggggccgtgcatacccggggtcttgacttcgcctgcgatatctacatttgggcccctctggctggtacttgcggggtcctgctgctttcactcgtgatcactctttactgtaagcgcggtcggaagaagctgctgtacatctttaagcaacccttcatgaggcctgtgcagactactcaagaggaggacggctgttcatgccggttcccagaggaggaggaaggcggctgcgaactgcgcgtgaaattcagccgcagcgcagatgctccagcctacaagcaggggcagaaccagctctacaacgaactcaatcttggtcggagagaggagtacgacgtgctggacaagcggagaggacgggacccagaaatgggcgggaagccgcgcagaaagaatccccaagagggcctgtacaacgagctccaaaaggataagatggcagaagcctatagcgagattggtatgaaaggggaacgcagaagaggcaaaggccacgacggactgtaccagggactcagcaccgccaccaaggacacctatgacgctcttcacatgcaggccctgccgcctcgg

SEQ ID NO: 835 - protein, 490 aa, Artificial Sequence
  source: /note="Description of Artificial Sequence: Synthetic polypeptide"
MALPVTALLLPLALLLHAARPEVQLVESGGGLVQPGGSLRLSCAASGFTFSSYAMSWVRQAPGKGLEWVSAISGSGGSTYYADSVKGRFTISRDNSKNTLYLQMNSLRAEDTAVYYCAKVEGSGSLDYWGQGTLVTVSSGGGGSGGGGSGGGGSEIVMTQSPGTLSLSPGERATLSCRASQSVSSAYLAWYQQKPGQPPRLLISGASTRATGIPDRFGGSGSGTDFTLTISRLEPEDFAVYYCQHYGSSFNGSSLFTFGQGTRLEIKTTTPAPRPPTPAPTIASQPLSLRPEACRPAAGGAVHTRGLDFACDIYIWAPLAGTCGVLLLSLVITLYCKRGRKKLLYIFKQPFMRPVQTTQEEDGCSCRFPEEEEGGCELRVKFSRSADAPAYKQGQNQLYNELNLGRREEYDVLDKRRGRDPEMGGKPRRKNPQEGLYNELQKDKMAEAYSEIGMKGERRRGKGHDGLYQGLSTATKDTYDALHMQALPPR

SEQ ID NO: 836 - DNA, 1470 bp, Artificial Sequence
  source: /note="Description of Artificial Sequence: Synthetic polynucleotide"
atggccctccctgtcaccgccctgctgcttccgctggctcttctgctccacgccgctcggcccgaagtgcagctcgtggagtcaggaggcggcctggtccagccgggagggtcccttagactgtcatgcgccgcaagcggattcactttctcctcctatgccatgagctgggtccgccaagcccccggaaagggactggaatgggtgtccgccatctcggggtctggaggctcaacttactacgctgactccgtgaagggacggttcaccattagccgcgacaactccaagaacaccctctacctccaaatgaactccctgcgggccgaggataccgccgtctactactgcgccaaagtggaaggttcaggatcgctggactactggggacagggtactctcgtgaccgtgtcatcgggcggaggaggttccggcggtggcggctccggcggcggagggtcggagatcgtgatgacccagagccctggtactctgagcctttcgccgggagaaagggccaccctgtcctgccgcgcttcccaatccgtgtcctccgcgtacttggcgtggtaccagcagaagccgggacagccccctcggctgctgatcagcggggccagcacccgggcaaccggaatcccagacagattcgggggttccggcagcggcacagatttcaccctgactatttcgaggttggagcccgaggactttgcggtgtattactgtcagcactacgggtcgtcctttaatggctccagcctgttcacgttcggacaggggacccgcctggaaatcaagaccactaccccagcaccgaggccacccaccccggctcctaccatcgcctcccagcctctgtccctgcgtccggaggcatgtagacccgcagctggtggggccgtgcatacccggggtcttgacttcgcctgcgatatctacatttgggcccctctggctggtacttgcggggtcctgctgctttcactcgtgatcactctttactgtaagcgcggtcggaagaagctgctgtacatctttaagcaacccttcatgaggcctgtgcagactactcaagaggaggacggctgttcatgccggttcccagaggaggaggaaggcggctgcgaactgcgcgtgaaattcagccgcagcgcagatgctccagcctacaagcaggggcagaaccagctctacaacgaactcaatcttggtcggagagaggagtacgacgtgctggacaagcggagaggacgggacccagaaatgggcgggaagccgcgcagaaagaatccccaagagggcctgtacaacgagctccaaaaggataagatggcagaagcctatagcgagattggtatgaaaggggaacgcagaagaggcaaaggccacgacggactgtaccagggactcagcaccgccaccaaggacacctatgacgctcttcacatgcaggccctgccgcctcgg

SEQ ID NO: 837 - protein, 485 aa, Artificial Sequence
  source: /note="Description of Artificial Sequence: Synthetic polypeptide"
MALPVTALLLPLALLLHAARPEVQLVETGGGLVQPGGSLRLSCAASGITFSRYPMSWVRQAPGKGLEWVSGISDSGVSTYYADSAKGRFTISRDNSKNTLFLQMSSLRDEDTAVYYCVTRAGSEASDIWGQGTMVTVSSGGGGSGGGGSGGGGSEIVLTQSPATLSLSPGERATLSCRASQSVSNSLAWYQQKPGQAPRLLIYDASSRATGIPDRFSGSGSGTDFTLTISRLEPEDFAIYYCQQFGTSSGLTFGGGTKLEIKTTTPAPRPPTPAPTIASQPLSLRPEACRPAAGGAVHTRGLDFACDIYIWAPLAGTCGVLLLSLVITLYCKRGRKKLLYIFKQPFMRPVQTTQEEDGCSCRFPEEEEGGCELRVKFSRSADAPAYKQGQNQLYNELNLGRREEYDVLDKRRGRDPEMGGKPRRKNPQEGLYNELQKDKMAEAYSEIGMKGERRRGKGHDGLYQGLSTATKDTYDALHMQALPPR

SEQ ID NO: 838 - DNA, 1455 bp, Artificial Sequence
  source: /note="Description of Artificial Sequence: Synthetic polynucleotide"
atggccctccctgtcaccgccctgctgcttccgctggctcttctgctccacgccgctcggcccgaagtgcaactggtggaaaccggtggcggcctggtgcagcctggaggatcattgaggctgtcatgcgcggccagcggtattaccttctcccggtaccccatgtcctgggtcagacaggccccggggaaagggcttgaatgggtgtccgggatctcggactccggtgtcagcacttactacgccgactccgccaagggacgcttcaccatttcccgggacaactcgaagaacaccctgttcctccaaatgagctccctccgggacgaggatactgcagtgtactactgcgtgacccgcgccgggtccgaggcgtctgacatttggggacagggcactatggtcaccgtgtcgtccggcggagggggctcgggaggcggtggcagcggaggaggagggtccgagatcgtgctgacccaatccccggccaccctctcgctgagccctggagaaagggcaaccttgtcctgtcgcgcgagccagtccgtgagcaactccctggcctggtaccagcagaagcccggacaggctccgagacttctgatctacgacgcttcgagccgggccactggaatccccgaccgcttttcggggtccggctcaggaaccgatttcaccctgacaatctcacggctggagccagaggatttcgccatctattactgccagcagttcggtacttcctccggcctgactttcggaggcggcacgaagctcgaaatcaagaccactaccccagcaccgaggccacccaccccggctcctaccatcgcctcccagcctctgtccctgcgtccggaggcatgtagacccgcagctggtggggccgtgcatacccggggtcttgacttcgcctgcgatatctacatttgggcccctctggctggtacttgcggggtcctgctgctttcactcgtgatcactctttactgtaagcgcggtcggaagaagctgctgtacatctttaagcaacccttcatgaggcctgtgcagactactcaagaggaggacggctgttcatgccggttcccagaggaggaggaaggcggctgcgaactgcgcgtgaaattcagccgcagcgcagatgctccagcctacaagcaggggcagaaccagctctacaacgaactcaatcttggtcggagagaggagtacgacgtgctggacaagcggagaggacgggacccagaaatgggcgggaagccgcgcagaaagaatccccaagagggcctgtacaacgagctccaaaaggataagatggcagaagcctatagcgagattggtatgaaaggggaacgcagaagaggcaaaggccacgacggactgtaccagggactcagcaccgccaccaaggacacctatgacgctcttcacatgcaggccctgccgcctcgg

SEQ ID NO: 839 - protein, 492 aa, Artificial Sequence
  source: /note="Description of Artificial Sequence: Synthetic polypeptide"
MALPVTALLLPLALLLHAARPQVQLVESGGGLVQPGGSLRLSCAASGFTFSSYAMSWVRQAPGKGLEWVSAISGSGGSTYYADSVKGRFTISRDNAKNSLYLQMNSLRAEDTAIYYCARATYKRELRYYYGMDVWGQGTMVTVSSGGGGSGGGGSGGGGSEIVMTQSPGTVSLSPGERATLSCRASQSVSSSFLAWYQQKPGQAPRLLIYGASSRATGIPDRFSGSGSGTDFTLTISRLEPEDSAVYYCQQYHSSPSWTFGQGTRLEIKTTTPAPRPPTPAPTIASQPLSLRPEACRPAAGGAVHTRGLDFACDIYIWAPLAGTCGVLLLSLVITLYCKRGRKKLLYIFKQPFMRPVQTTQEEDGCSCRFPEEEEGGCELRVKFSRSADAPAYKQGQNQLYNELNLGRREEYDVLDKRRGRDPEMGGKPRRKNPQEGLYNELQKDKMAEAYSEIGMKGERRRGKGHDGLYQGLSTATKDTYDALHMQALPPR

SEQ ID NO: 840 - DNA, 1476 bp, Artificial Sequence
  source: /note="Description of Artificial Sequence: Synthetic polynucleotide"
atggccctccctgtcaccgccctgctgcttccgctggctcttctgctccacgccgctcggccccaagtgcagctcgtggaatcgggtggcggactggtgcagccggggggctcacttagactgtcctgcgcggccagcggattcactttctcctcctacgccatgtcctgggtcagacaggcccctggaaagggcctggaatgggtgtccgcaatcagcggcagcggcggctcgacctattacgcggattcagtgaagggcagattcaccatttcccgggacaacgccaagaactccttgtaccttcaaatgaactccctccgcgcggaagataccgcaatctactactgcgctcgggccacttacaagagggaactgcgctactactacgggatggacgtctggggccagggaaccatggtcaccgtgtccagcggaggaggaggatcgggaggaggcggtagcgggggtggagggtcggagatcgtgatgacccagtcccccggcactgtgtcgctgtcccccggcgaacgggccaccctgtcatgtcgggccagccagtcagtgtcgtcaagcttcctcgcctggtaccagcagaaaccgggacaagctccccgcctgctgatctacggagccagcagccgggccaccggtattcctgaccggttctccggttcggggtccgggaccgactttactctgactatctctcgcctcgagccagaggactccgccgtgtattactgccagcagtaccactcctccccgtcctggacgttcggacagggcacaaggctggagattaagaccactaccccagcaccgaggccacccaccccggctcctaccatcgcctcccagcctctgtccctgcgtccggaggcatgtagacccgcagctggtggggccgtgcatacccggggtcttgacttcgcctgcgatatctacatttgggcccctctggctggtacttgcggggtcctgctgctttcactcgtgatcactctttactgtaagcgcggtcggaagaagctgctgtacatctttaagcaacccttcatgaggcctgtgcagactactcaagaggaggacggctgttcatgccggttcccagaggaggaggaaggcggctgcgaactgcgcgtgaaattcagccgcagcgcagatgctccagcctacaagcaggggcagaaccagctctacaacgaactcaatcttggtcggagagaggagtacgacgtgctggacaagcggagaggacgggacccagaaatgggcgggaagccgcgcagaaagaatccccaagagggcctgtacaacgagctccaaaaggataagatggcagaagcctatagcgagattggtatgaaaggggaacgcagaagaggcaaaggccacgacggactgtaccagggactcagcaccgccaccaaggacacctatgacgctcttcacatgcaggccctgccgcctcgg

SEQ ID NO: 841 - protein, 492 aa, Artificial Sequence
  source: /note="Description of Artificial Sequence: Synthetic polypeptide"
MALPVTALLLPLALLLHAARPEVQLVETGGGLVQPGGSLRLSCAASGFTFSSYAMSWVRQAPGKGLEWVSAISGSGGSTYYADSVKGRFTISRDNSKNTLYLQMNTLKAEDTAVYYCARATYKRELRYYYGMDVWGQGTTVTVSSGGGGSGGGGSGGGGSEIVLTQSPSTLSLSPGESATLSCRASQSVSTTFLAWYQQKPGQAPRLLIYGSSNRATGIPDRFSGSGSGTDFTLTIRRLEPEDFAVYYCQQYHSSPSWTFGQGTKVEIKTTTPAPRPPTPAPTIASQPLSLRPEACRPAAGGAVHTRGLDFACDIYIWAPLAGTCGVLLLSLVITLYCKRGRKKLLYIFKQPFMRPVQTTQEEDGCSCRFPEEEEGGCELRVKFSRSADAPAYKQGQNQLYNELNLGRREEYDVLDKRRGRDPEMGGKPRRKNPQEGLYNELQKDKMAEAYSEIGMKGERRRGKGHDGLYQGLSTATKDTYDALHMQALPPR

SEQ ID NO: 842 - DNA, 1476 bp, Artificial Sequence
  source: /note="Description of Artificial Sequence: Synthetic polynucleotide"
atggccctccctgtcaccgccctgctgcttccgctggctcttctgctccacgccgctcggcccgaggtgcagcttgtggaaaccggtggcggactggtgcagcccggaggaagcctcaggctgtcctgcgccgcgtccggcttcaccttctcctcgtacgccatgtcctgggtccgccaggcccccggaaagggcctggaatgggtgtccgccatctctggaagcggaggttccacgtactacgcggacagcgtcaagggaaggttcacaatctcccgcgataattcgaagaacactctgtaccttcaaatgaacaccctgaaggccgaggacactgctgtgtactactgcgcacgggccacctacaagagagagctccggtactactacggaatggacgtctggggccagggaactactgtgaccgtgtcctcgggagggggtggctccggggggggcggctccggcggaggcggttccgagattgtgctgacccagtcaccttcaactctgtcgctgtccccgggagagagcgctactctgagctgccgggccagccagtccgtgtccaccaccttcctcgcctggtatcagcagaagccggggcaggcaccacggctcttgatctacgggtcaagcaacagagcgaccggaattcctgaccgcttctcggggagcggttcaggcaccgacttcaccctgactatccggcgcctggaacccgaagatttcgccgtgtattactgtcaacagtaccactcctcgccgtcctggacctttggccaaggaaccaaagtggaaatcaagaccactaccccagcaccgaggccacccaccccggctcctaccatcgcctcccagcctctgtccctgcgtccggaggcatgtagacccgcagctggtggggccgtgcatacccggggtcttgacttcgcctgcgatatctacatttgggcccctctggctggtacttgcggggtcctgctgctttcactcgtgatcactctttactgtaagcgcggtcggaagaagctgctgtacatctttaagcaacccttcatgaggcctgtgcagactactcaagaggaggacggctgttcatgccggttcccagaggaggaggaaggcggctgcgaactgcgcgtgaaattcagccgcagcgcagatgctccagcctacaagcaggggcagaaccagctctacaacgaactcaatcttggtcggagagaggagtacgacgtgctggacaagcggagaggacgggacccagaaatgggcgggaagccgcgcagaaagaatccccaagagggcctgtacaacgagctccaaaaggataagatggcagaagcctatagcgagattggtatgaaaggggaacgcagaagaggcaaaggccacgacggactgtaccagggactcagcaccgccaccaaggacacctatgacgctcttcacatgcaggccctgccgcctcgg

SEQ ID NO: 843 - protein, 483 aa, Artificial Sequence
  source: /note="Description of Artificial Sequence: Synthetic polypeptide"
MALPVTALLLPLALLLHAARPEVQLVETGGGLVQPGRSLRLSCAASGFTFDDYAMHWVRQAPGKGLEWVSGISWNSGSIGYADSVKGRFTISRDNAKNSLYLQMNSLRDEDTAVYYCARVGKAVPDVWGQGTTVTVSSGGGGSGGGGSGGGGSDIVMTQTPSSLSASVGDRVTITCRASQSISSYLNWYQQKPGKAPKLLIYAASSLQSGVPSRFSGSGSGTDFTLTISSLQPEDFATYYCQQSYSTPYSFGQGTRLEIKTTTPAPRPPTPAPTIASQPLSLRPEACRPAAGGAVHTRGLDFACDIYIWAPLAGTCGVLLLSLVITLYCKRGRKKLLYIFKQPFMRPVQTTQEEDGCSCRFPEEEEGGCELRVKFSRSADAPAYKQGQNQLYNELNLGRREEYDVLDKRRGRDPEMGGKPRRKNPQEGLYNELQKDKMAEAYSEIGMKGERRRGKGHDGLYQGLSTATKDTYDALHMQALPPR

SEQ ID NO: 844 - DNA, 1449 bp, Artificial Sequence
  source: /note="Description of Artificial Sequence: Synthetic polynucleotide"
atggccctccctgtcaccgccctgctgcttccgctggctcttctgctccacgccgctcggcccgaagtgcagctcgtggaaactggaggtggactcgtgcagcctggacggtcgctgcggctgagctgcgctgcatccggcttcaccttcgacgattatgccatgcactgggtcagacaggcgccagggaagggacttgagtgggtgtccggtatcagctggaatagcggctcaatcggatacgcggactccgtgaagggaaggttcaccatttcccgcgacaacgccaagaactccctgtacttgcaaatgaacagcctccgggatgaggacactgccgtgtactactgcgcccgcgtcggaaaagctgtgcccgacgtctggggccagggaaccactgtgaccgtgtccagcggcgggggtggatcgggcggtggagggtccggtggagggggctcagatattgtgatgacccagaccccctcgtccctgtccgcctcggtcggcgaccgcgtgactatcacatgtagagcctcgcagagcatctccagctacctgaactggtatcagcagaagccggggaaggccccgaagctcctgatctacgcggcatcatcactgcaatcgggagtgccgagccggttttccgggtccggctccggcaccgacttcacgctgaccatttcttccctgcaacccgaggacttcgccacttactactgccagcagtcctactccaccccttactccttcggccaaggaaccaggctggaaatcaagaccactaccccagcaccgaggccacccaccccggctcctaccatcgcctcccagcctctgtccctgcgtccggaggcatgtagacccgcagctggtggggccgtgcatacccggggtcttgacttcgcctgcgatatctacatttgggcccctctggctggtacttgcggggtcctgctgctttcactcgtgatcactctttactgtaagcgcggtcggaagaagctgctgtacatctttaagcaacccttcatgaggcctgtgcagactactcaagaggaggacggctgttcatgccggttcccagaggaggaggaaggcggctgcgaactgcgcgtgaaattcagccgcagcgcagatgctccagcctacaagcaggggcagaaccagctctacaacgaactcaatcttggtcggagagaggagtacgacgtgctggacaagcggagaggacgggacccagaaatgggcgggaagccgcgcagaaagaatccccaagagggcctgtacaacgagctccaaaaggataagatggcagaagcctatagcgagattggtatgaaaggggaacgcagaagaggcaaaggccacgacggactgtaccagggactcagcaccgccaccaaggacacctatgacgctcttcacatgcaggccctgccgcctcgg

SEQ ID NO: 845 - protein, 490 aa, Artificial Sequence
  source: /note="Description of Artificial Sequence: Synthetic polypeptide"
MALPVTALLLPLALLLHAARPEVQLVESGGGLVQPGRSLRLSCTASGFTFDDYAMHWVRQRPGKGLEWVASINWKGNSLAYGDSVKGRFAISRDNAKNTVFLQMNSLRTEDTAVYYCASHQGVAYYNYAMDVWGRGTLVTVSSGGGGSGGGGSGGGGSEIVLTQSPGTLSLSPGERATLSCRATQSIGSSFLAWYQQRPGQAPRLLIYGASQRATGIPDRFSGRGSGTDFTLTISRVEPEDSAVYYCQHYESSPSWTFGQGTKVEIKTTTPAPRPPTPAPTIASQPLSLRPEACRPAAGGAVHTRGLDFACDIYIWAPLAGTCGVLLLSLVITLYCKRGRKKLLYIFKQPFMRPVQTTQEEDGCSCRFPEEEEGGCELRVKFSRSADAPAYKQGQNQLYNELNLGRREEYDVLDKRRGRDPEMGGKPRRKNPQEGLYNELQKDKMAEAYSEIGMKGERRRGKGHDGLYQGLSTATKDTYDALHMQALPPR

SEQ ID NO: 846 - DNA, 1470 bp, Artificial Sequence
  source: /note="Description of Artificial Sequence: Synthetic polynucleotide"
atggccctccctgtcaccgccctgctgcttccgctggctcttctgctccacgccgctcggcccgaagtgcagctcgtggagagcgggggaggattggtgcagcccggaaggtccctgcggctctcctgcactgcgtctggcttcaccttcgacgactacgcgatgcactgggtcagacagcgcccgggaaagggcctggaatgggtcgcctcaatcaactggaagggaaactccctggcctatggcgacagcgtgaagggccgcttcgccatttcgcgcgacaacgccaagaacaccgtgtttctgcaaatgaattccctgcggaccgaggataccgctgtgtactactgcgccagccaccagggcgtggcatactataactacgccatggacgtgtggggaagagggacgctcgtcaccgtgtcctccgggggcggtggatcgggtggaggaggaagcggtggcgggggcagcgaaatcgtgctgactcagagcccgggaactctttcactgtccccgggagaacgggccactctctcgtgccgggccacccagtccatcggctcctccttccttgcctggtaccagcagaggccaggacaggcgccccgcctgctgatctacggtgcttcccaacgcgccactggcattcctgaccggttcagcggcagagggtcgggaaccgatttcacactgaccatttcccgggtggagcccgaagattcggcagtctactactgtcagcattacgagtcctccccttcatggaccttcggtcaagggaccaaagtggagatcaagaccactaccccagcaccgaggccacccaccccggctcctaccatcgcctcccagcctctgtccctgcgtccggaggcatgtagacccgcagctggtggggccgtgcatacccggggtcttgacttcgcctgcgatatctacatttgggcccctctggctggtacttgcggggtcctgctgctttcactcgtgatcactctttactgtaagcgcggtcggaagaagctgctgtacatctttaagcaacccttcatgaggcctgtgcagactactcaagaggaggacggctgttcatgccggttcccagaggaggaggaaggcggctgcgaactgcgcgtgaaattcagccgcagcgcagatgctccagcctacaagcaggggcagaaccagctctacaacgaactcaatcttggtcggagagaggagtacgacgtgctggacaagcggagaggacgggacccagaaatgggcgggaagccgcgcagaaagaatccccaagagggcctgtacaacgagctccaaaaggataagatggcagaagcctatagcgagattggtatgaaaggggaacgcagaagaggcaaaggccacgacggactgtaccagggactcagcaccgccaccaaggacacctatgacgctcttcacatgcaggccctgccgcctcgg

SEQ ID NO: 847 - protein, 485 aa, Artificial Sequence
  source: /note="Description of Artificial Sequence: Synthetic polypeptide"
MALPVTALLLPLALLLHAARPEVQLVESGGGLVQPGGSLRLSCAASGFTFSSYAMSWVRQAPGKGLEWVSAISGSGGSTYYADSVKGRFTISRDNSKNTLYLQMNSLRAEDTAVYYCAKVVRDGMDVWGQGTTVTVSSGGGGSGGGGSGGGGSEIVLTQSPATLSLSPGERATLSCRASQSVSSSYLAWYQQKPGQAPRLLIYGASSRATGIPDRFSGNGSGTDFTLTISRLEPEDFAVYYCQQYGSPPRFTFGPGTKVDIKTTTPAPRPPTPAPTIASQPLSLRPEACRPAAGGAVHTRGLDFACDIYIWAPLAGTCGVLLLSLVITLYCKRGRKKLLYIFKQPFMRPVQTTQEEDGCSCRFPEEEEGGCELRVKFSRSADAPAYKQGQNQLYNELNLGRREEYDVLDKRRGRDPEMGGKPRRKNPQEGLYNELQKDKMAEAYSEIGMKGERRRGKGHDGLYQGLSTATKDTYDALHMQALPPR

SEQ ID NO: 848 - DNA, 1455 bp, Artificial Sequence
  source: /note="Description of Artificial Sequence: Synthetic polynucleotide"
atggccctccctgtcaccgccctgctgcttccgctggctcttctgctccacgccgctcggcccgaggtgcagttggtcgaaagcgggggcgggcttgtgcagcctggcggatcactgcggctgtcctgcgcggcatcaggcttcacgttttcttcctacgccatgtcctgggtgcgccaggcccctggaaagggactggaatgggtgtccgcgatttcggggtccggcgggagcacctactacgccgattccgtgaagggccgcttcactatctcgcgggacaactccaagaacaccctctacctccaaatgaatagcctgcgggccgaggataccgccgtctactattgcgctaaggtcgtgcgcgacggaatggacgtgtggggacagggtaccaccgtgacagtgtcctcggggggaggcggtagcggcggaggaggaagcggtggtggaggttccgagattgtgctgactcaatcacccgcgaccctgagcctgtcccccggcgaaagggccactctgtcctgtcgggccagccaatcagtctcctcctcgtacctggcctggtaccagcagaagccaggacaggctccgagactccttatctatggcgcatcctcccgcgccaccggaatcccggataggttctcgggaaacggatcggggaccgacttcactctcaccatctcccggctggaaccggaggacttcgccgtgtactactgccagcagtacggcagcccgcctagattcactttcggccccggcaccaaagtggacatcaagaccactaccccagcaccgaggccacccaccccggctcctaccatcgcctcccagcctctgtccctgcgtccggaggcatgtagacccgcagctggtggggccgtgcatacccggggtcttgacttcgcctgcgatatctacatttgggcccctctggctggtacttgcggggtcctgctgctttcactcgtgatcactctttactgtaagcgcggtcggaagaagctgctgtacatctttaagcaacccttcatgaggcctgtgcagactactcaagaggaggacggctgttcatgccggttcccagaggaggaggaaggcggctgcgaactgcgcgtgaaattcagccgcagcgcagatgctccagcctacaagcaggggcagaaccagctctacaacgaactcaatcttggtcggagagaggagtacgacgtgctggacaagcggagaggacgggacccagaaatgggcgggaagccgcgcagaaagaatccccaagagggcctgtacaacgagctccaaaaggataagatggcagaagcctatagcgagattggtatgaaaggggaacgcagaagaggcaaaggccacgacggactgtaccagggactcagcaccgccaccaaggacacctatgacgctcttcacatgcaggccctgccgcctcgg

SEQ ID NO: 849 - protein, 486 aa, Artificial Sequence
  source: /note="Description of Artificial Sequence: Synthetic polypeptide"
MALPVTALLLPLALLLHAARPEVQLLESGGGLVQPGGSLRLSCAASGFTFSSYAMSWVRQAPGKGLEWVSAISGSGGSTYYADSVKGRFTISRDNSKNTLYLQMNSLRAEDTAVYYCAKIPQTGTFDYWGQGTLVTVSSGGGGSGGGGSGGGGSEIVLTQSPGTLSLSPGERATLSCRASQSVSSSYLAWYQQRPGQAPRLLIYGASSRATGIPDRFSGSGSGTDFTLTISRLEPEDFAVYYCQHYGSSPSWTFGQGTRLEIKTTTPAPRPPTPAPTIASQPLSLRPEACRPAAGGAVHTRGLDFACDIYIWAPLAGTCGVLLLSLVITLYCKRGRKKLLYIFKQPFMRPVQTTQEEDGCSCRFPEEEEGGCELRVKFSRSADAPAYKQGQNQLYNELNLGRREEYDVLDKRRGRDPEMGGKPRRKNPQEGLYNELQKDKMAEAYSEIGMKGERRRGKGHDGLYQGLSTATKDTYDALHMQALPPR

SEQ ID NO: 850 - DNA, 1458 bp, Artificial Sequence
  source: /note="Description of Artificial Sequence: Synthetic polynucleotide"
atggccctccctgtcaccgccctgctgcttccgctggctcttctgctccacgccgctcggcccgaagtgcagctgctggagtccggcggtggattggtgcaaccggggggatcgctcagactgtcctgtgcggcgtcaggcttcaccttctcgagctacgccatgtcatgggtcagacaggcccctggaaagggtctggaatgggtgtccgccatttccgggagcgggggatctacatactacgccgatagcgtgaagggccgcttcaccatttcccgggacaactccaagaacactctctatctgcaaatgaactccctccgcgctgaggacactgccgtgtactactgcgccaaaatccctcagaccggcaccttcgactactggggacaggggactctggtcaccgtcagcagcggtggcggaggttcggggggaggaggaagcggcggcggagggtccgagattgtgctgacccagtcacccggcactttgtccctgtcgcctggagaaagggccaccctttcctgccgggcatcccaatccgtgtcctcctcgtacctggcctggtaccagcagaggcccggacaggccccacggcttctgatctacggagcaagcagccgcgcgaccggtatcccggaccggttttcgggctcgggctcaggaactgacttcaccctcaccatctcccgcctggaacccgaagatttcgctgtgtattactgccagcactacggcagctccccgtcctggacgttcggccagggaactcggctggagatcaagaccactaccccagcaccgaggccacccaccccggctcctaccatcgcctcccagcctctgtccctgcgtccggaggcatgtagacccgcagctggtggggccgtgcatacccggggtcttgacttcgcctgcgatatctacatttgggcccctctggctggtacttgcggggtcctgctgctttcactcgtgatcactctttactgtaagcgcggtcggaagaagctgctgtacatctttaagcaacccttcatgaggcctgtgcagactactcaagaggaggacggctgttcatgccggttcccagaggaggaggaaggcggctgcgaactgcgcgtgaaattcagccgcagcgcagatgctccagcctacaagcaggggcagaaccagctctacaacgaactcaatcttggtcggagagaggagtacgacgtgctggacaagcggagaggacgggacccagaaatgggcgggaagccgcgcagaaagaatccccaagagggcctgtacaacgagctccaaaaggataagatggcagaagcctatagcgagattggtatgaaaggggaacgcagaagaggcaaaggccacgacggactgtaccagggactcagcaccgccaccaaggacacctatgacgctcttcacatgcaggccctgccgcctcgg

SEQ ID NO: 851 - protein, 492 aa, Artificial Sequence
  source: /note="Description of Artificial Sequence: Synthetic polypeptide"
MALPVTALLLPLALLLHAARPEVQLVETGGGLVQPGGSLRLSCAASGFTFSSYAMSWVRQAPGKGLEWVSAISGSGGSTYYADSVKGRFTMSRENDKNSVFLQMNSLRVEDTGVYYCARANYKRELRYYYGMDVWGQGTMVTVSSGGGGSGGGGSGGGGSEIVMTQSPGTLSLSPGESATLSCRASQRVASNYLAWYQHKPGQAPSLLISGASSRATGVPDRFSGSGSGTDFTLAISRLEPEDSAVYYCQHYDSSPSWTFGQGTKVEIKTTTPAPRPPTPAPTIASQPLSLRPEACRPAAGGAVHTRGLDFACDIYIWAPLAGTCGVLLLSLVITLYCKRGRKKLLYIFKQPFMRPVQTTQEEDGCSCRFPEEEEGGCELRVKFSRSADAPAYKQGQNQLYNELNLGRREEYDVLDKRRGRDPEMGGKPRRKNPQEGLYNELQKDKMAEAYSEIGMKGERRRGKGHDGLYQGLSTATKDTYDALHMQALPPR

SEQ ID NO: 852 - DNA, 1476 bp, Artificial Sequence
  source: /note="Description of Artificial Sequence: Synthetic polynucleotide"
atggccctccctgtcaccgccctgctgcttccgctggctcttctgctccacgccgctcggcccgaagtgcaactggtggaaaccggtggaggactcgtgcagcctggcggcagcctccggctgagctgcgccgcttcgggattcaccttttcctcctacgcgatgtcttgggtcagacaggcccccggaaaggggctggaatgggtgtcagccatctccggctccggcggatcaacgtactacgccgactccgtgaaaggccggttcaccatgtcgcgcgagaatgacaagaactccgtgttcctgcaaatgaactccctgagggtggaggacaccggagtgtactattgtgcgcgcgccaactacaagagagagctgcggtactactacggaatggacgtctggggacagggaactatggtgaccgtgtcatccggtggagggggaagcggcggtggaggcagcgggggcgggggttcagaaattgtcatgacccagtccccgggaactctttccctctcccccggggaatccgcgactttgtcctgccgggccagccagcgcgtggcctcgaactacctcgcatggtaccagcataagccaggccaagccccttccctgctgatttccggggctagcagccgcgccactggcgtgccggataggttctcgggaagcggctcgggtaccgatttcaccctggcaatctcgcggctggaaccggaggattcggccgtgtactactgccagcactatgactcatccccctcctggacattcggacagggcaccaaggtcgagatcaagaccactaccccagcaccgaggccacccaccccggctcctaccatcgcctcccagcctctgtccctgcgtccggaggcatgtagacccgcagctggtggggccgtgcatacccggggtcttgacttcgcctgcgatatctacatttgggcccctctggctggtacttgcggggtcctgctgctttcactcgtgatcactctttactgtaagcgcggtcggaagaagctgctgtacatctttaagcaacccttcatgaggcctgtgcagactactcaagaggaggacggctgttcatgccggttcccagaggaggaggaaggcggctgcgaactgcgcgtgaaattcagccgcagcgcagatgctccagcctacaagcaggggcagaaccagctctacaacgaactcaatcttggtcggagagaggagtacgacgtgctggacaagcggagaggacgggacccagaaatgggcgggaagccgcgcagaaagaatccccaagagggcctgtacaacgagctccaaaaggataagatggcagaagcctatagcgagattggtatgaaaggggaacgcagaagaggcaaaggccacgacggactgtaccagggactcagcaccgccaccaaggacacctatgacgctcttcacatgcaggccctgccgcctcgg

SEQ ID NO: 853 - protein, 488 aa, Artificial Sequence
  source: /note="Description of Artificial Sequence: Synthetic polypeptide"
MALPVTALLLPLALLLHAARPEVQLLETGGGLVQPGGSLRLSCAASGFSFSSYAMSWVRQAPGKGLEWVSAISGSGGSTYYADSVKGRFTISRDNSKNTLYLQMNSLRAEDTAVYYCAKALVGATGAFDIWGQGTLVTVSSGGGGSGGGGSGGGGSEIVLTQSPGTLSLSPGERATLSCRASQSLSSNFLAWYQQKPGQAPGLLIYGASNWATGTPDRFSGSGSGTDFTLTITRLEPEDFAVYYCQYYGTSPMYTFGQGTKVEIKTTTPAPRPPTPAPTIASQPLSLRPEACRPAAGGAVHTRGLDFACDIYIWAPLAGTCGVLLLSLVITLYCKRGRKKLLYIFKQPFMRPVQTTQEEDGCSCRFPEEEEGGCELRVKFSRSADAPAYKQGQNQLYNELNLGRREEYDVLDKRRGRDPEMGGKPRRKNPQEGLYNELQKDKMAEAYSEIGMKGERRRGKGHDGLYQGLSTATKDTYDALHMQALPPR

SEQ ID NO: 854 - DNA, 1464 bp, Artificial Sequence
  source: /note="Description of Artificial Sequence: Synthetic polynucleotide"
atggccctccctgtcaccgccctgctgcttccgctggctcttctgctccacgccgctcggcccgaagtgcagctgctcgaaaccggtggagggctggtgcagccagggggctccctgaggctttcatgcgccgctagcggattctccttctcctcttacgccatgtcgtgggtccgccaagcccctggaaaaggcctggaatgggtgtccgcgatttccgggagcggaggttcgacctattacgccgactccgtgaagggccgctttaccatctcccgggataactccaagaacactctgtacctccaaatgaactcgctgagagccgaggacaccgccgtgtattactgcgcgaaggcgctggtcggcgcgactggggcattcgacatctggggacagggaactcttgtgaccgtgtcgagcggaggcggcggctccggcggaggagggagcgggggcggtggttccgaaatcgtgttgactcagtccccgggaaccctgagcttgtcacccggggagcgggccactctctcctgtcgcgcctcccaatcgctctcatccaatttcctggcctggtaccagcagaagcccggacaggccccgggcctgctcatctacggcgcttcaaactgggcaacgggaacccctgatcggttcagcggaagcggatcgggtactgactttaccctgaccatcaccagactggaaccggaggacttcgccgtgtactactgccagtactacggcacctcccccatgtacacattcggacagggtaccaaggtcgagattaagaccactaccccagcaccgaggccacccaccccggctcctaccatcgcctcccagcctctgtccctgcgtccggaggcatgtagacccgcagctggtggggccgtgcatacccggggtcttgacttcgcctgcgatatctacatttgggcccctctggctggtacttgcggggtcctgctgctttcactcgtgatcactctttactgtaagcgcggtcggaagaagctgctgtacatctttaagcaacccttcatgaggcctgtgcagactactcaagaggaggacggctgttcatgccggttcccagaggaggaggaaggcggctgcgaactgcgcgtgaaattcagccgcagcgcagatgctccagcctacaagcaggggcagaaccagctctacaacgaactcaatcttggtcggagagaggagtacgacgtgctggacaagcggagaggacgggacccagaaatgggcgggaagccgcgcagaaagaatccccaagagggcctgtacaacgagctccaaaaggataagatggcagaagcctatagcgagattggtatgaaaggggaacgcagaagaggcaaaggccacgacggactgtaccagggactcagcaccgccaccaaggacacctatgacgctcttcacatgcaggccctgccgcctcgg

SEQ ID NO: 855 - protein, 488 aa, Artificial Sequence
  source: /note="Description of Artificial Sequence: Synthetic polypeptide"
MALPVTALLLPLALLLHAARPEVQLLESGGGLVQPGGSLRLSCAASGFTFSSYAMSWVRQAPGKGLEWVSAISGSGGSTYYADSVKGRFTISRDNSKNTLYLQMNSLRAEDTAVYYCVLWFGEGFDPWGQGTLVTVSSGGGGSGGGGSGGGGSDIVLTQSPLSLPVTPGEPASISCRSSQSLLHSNGYNYLDWYLQKPGQSPQLLIYLGSNRASGVPDRFSGSGSGTDFTLKISRVEAEDVGVYYCMQALQTPLTFGGGTKVDIKTTTPAPRPPTPAPTIASQPLSLRPEACRPAAGGAVHTRGLDFACDIYIWAPLAGTCGVLLLSLVITLYCKRGRKKLLYIFKQPFMRPVQTTQEEDGCSCRFPEEEEGGCELRVKFSRSADAPAYKQGQNQLYNELNLGRREEYDVLDKRRGRDPEMGGKPRRKNPQEGLYNELQKDKMAEAYSEIGMKGERRRGKGHDGLYQGLSTATKDTYDALHMQALPPR

SEQ ID NO: 856 - DNA, 1464 bp, Artificial Sequence
  source: /note="Description of Artificial Sequence: Synthetic polynucleotide"
atggccctccctgtcaccgccctgctgcttccgctggctcttctgctccacgccgctcggcccgaagtgcagctgcttgagagcggtggaggtctggtgcagcccgggggatcactgcgcctgtcctgtgccgcgtccggtttcactttctcctcgtacgccatgtcgtgggtcagacaggcaccgggaaagggactggaatgggtgtcagccatttcgggttcggggggcagcacctactacgctgactccgtgaagggccggttcaccatttcccgcgacaactccaagaacaccttgtacctccaaatgaactccctgcgggccgaagataccgccgtgtattactgcgtgctgtggttcggagagggattcgacccgtggggacaaggaacactcgtgactgtgtcatccggcggaggcggcagcggtggcggcggttccggcggcggcggatctgacatcgtgttgacccagtcccctctgagcctgccggtcactcctggcgaaccagccagcatctcctgccggtcgagccagtccctcctgcactccaatgggtacaactacctcgattggtatctgcaaaagccgggccagagcccccagctgctgatctaccttgggtcaaaccgcgcttccggggtgcctgatagattctccgggtccgggagcggaaccgactttaccctgaaaatctcgagggtggaggccgaggacgtcggagtgtactactgcatgcaggcgctccagactcccctgaccttcggaggaggaacgaaggtcgacatcaagaccactaccccagcaccgaggccacccaccccggctcctaccatcgcctcccagcctctgtccctgcgtccggaggcatgtagacccgcagctggtggggccgtgcatacccggggtcttgacttcgcctgcgatatctacatttgggcccctctggctggtacttgcggggtcctgctgctttcactcgtgatcactctttactgtaagcgcggtcggaagaagctgctgtacatctttaagcaacccttcatgaggcctgtgcagactactcaagaggaggacggctgttcatgccggttcccagaggaggaggaaggcggctgcgaactgcgcgtgaaattcagccgcagcgcagatgctccagcctacaagcaggggcagaaccagctctacaacgaactcaatcttggtcggagagaggagtacgacgtgctggacaagcggagaggacgggacccagaaatgggcgggaagccgcgcagaaagaatccccaagagggcctgtacaacgagctccaaaaggataagatggcagaagcctatagcgagattggtatgaaaggggaacgcagaagaggcaaaggccacgacggactgtaccagggactcagcaccgccaccaaggacacctatgacgctcttcacatgcaggccctgccgcctcgg

SEQ ID NO: 857 - protein, 495 aa, Artificial Sequence
  source: /note="Description of Artificial Sequence: Synthetic polypeptide"
MALPVTALLLPLALLLHAARPQVQLVESGGGLVQPGGSLRLSCAASGFTFSSYAMSWVRQAPGKGLEWVSAISGSGGSTYYADSVKGRFTISRDNSKNTLYLQMNSLRAEDTAVYYCAKVGYDSSGYYRDYYGMDVWGQGTTVTVSSGGGGSGGGGSGGGGSEIVLTQSPGTLSLSPGERATLSCRASQSVSSSYLAWYQQKPGQAPRLLIYGTSSRATGISDRFSGSGSGTDFTLTISRLEPEDFAVYYCQHYGNSPPKFTFGPGTKLEIKTTTPAPRPPTPAPTIASQPLSLRPEACRPAAGGAVHTRGLDFACDIYIWAPLAGTCGVLLLSLVITLYCKRGRKKLLYIFKQPFMRPVQTTQEEDGCSCRFPEEEEGGCELRVKFSRSADAPAYKQGQNQLYNELNLGRREEYDVLDKRRGRDPEMGGKPRRKNPQEGLYNELQKDKMAEAYSEIGMKGERRRGKGHDGLYQGLSTATKDTYDALHMQALPPR

SEQ ID NO: 858 - DNA, 1485 bp, Artificial Sequence
  source: /note="Description of Artificial Sequence: Synthetic polynucleotide"
atggccctccctgtcaccgccctgctgcttccgctggctcttctgctccacgccgctcggccccaagtgcagctcgtggagtcaggcggaggactggtgcagcccgggggctccctgagactttcctgcgcggcatcgggttttaccttctcctcctatgctatgtcctgggtgcgccaggccccgggaaagggactggaatgggtgtccgcaatcagcggtagcgggggctcaacatactacgccgactccgtcaagggtcgcttcactatttcccgggacaactccaagaataccctgtacctccaaatgaacagcctcagggccgaggatactgccgtgtactactgcgccaaagtcggatacgatagctccggttactaccgggactactacggaatggacgtgtggggacagggcaccaccgtgaccgtgtcaagcggcggaggcggttcaggagggggaggctccggcggtggagggtccgaaatcgtcctgactcagtcgcctggcactctgtcgttgtccccgggggagcgcgctaccctgtcgtgtcgggcgtcgcagtccgtgtcgagctcctacctcgcgtggtaccagcagaagcccggacaggcccctagacttctgatctacggcacttcttcacgcgccaccgggatcagcgacaggttcagcggctccggctccgggaccgacttcaccctgaccattagccggctggagcctgaagatttcgccgtgtattactgccaacactacggaaactcgccgccaaagttcacgttcggacccggaaccaagctggaaatcaagaccactaccccagcaccgaggccacccaccccggctcctaccatcgcctcccagcctctgtccctgcgtccggaggcatgtagacccgcagctggtggggccgtgcatacccggggtcttgacttcgcctgcgatatctacatttgggcccctctggctggtacttgcggggtcctgctgctttcactcgtgatcactctttactgtaagcgcggtcggaagaagctgctgtacatctttaagcaacccttcatgaggcctgtgcagactactcaagaggaggacggctgttcatgccggttcccagaggaggaggaaggcggctgcgaactgcgcgtgaaattcagccgcagcgcagatgctccagcctacaagcaggggcagaaccagctctacaacgaactcaatcttggtcggagagaggagtacgacgtgctggacaagcggagaggacgggacccagaaatgggcgggaagccgcgcagaaagaatccccaagagggcctgtacaacgagctccaaaaggataagatggcagaagcctatagcgagattggtatgaaaggggaacgcagaagaggcaaaggccacgacggactgtaccagggactcagcaccgccaccaaggacacctatgacgctcttcacatgcaggccctgccgcctcgg

SEQ ID NO: 859 - protein, 490 aa, Artificial Sequence
  source: /note="Description of Artificial Sequence: Synthetic polypeptide"
MALPVTALLLPLALLLHAARPEVQLVESGGGLVQPGGSLRLSCAASGFTFSSYAMSWVRQAPGKGLEWVSAISGSGGSTYYADSVKGRFTISRDNSKNTLYLQMNSLRAEDTAVYYCAKMGWSSGYLGAFDIWGQGTTVTVSSGGGGSGGGGSGGGGSEIVLTQSPGTLSLSPGERATLSCRASQSVASSFLAWYQQKPGQAPRLLIYGASGRATGIPDRFSGSGSGTDFTLTISRLEPEDFAVYYCQHYGGSPRLTFGGGTKVDIKTTTPAPRPPTPAPTIASQPLSLRPEACRPAAGGAVHTRGLDFACDIYIWAPLAGTCGVLLLSLVITLYCKRGRKKLLYIFKQPFMRPVQTTQEEDGCSCRFPEEEEGGCELRVKFSRSADAPAYKQGQNQLYNELNLGRREEYDVLDKRRGRDPEMGGKPRRKNPQEGLYNELQKDKMAEAYSEIGMKGERRRGKGHDGLYQGLSTATKDTYDALHMQALPPR

SEQ ID NO: 860 - DNA, 1470 bp, Artificial Sequence
  source: /note="Description of Artificial Sequence: Synthetic polynucleotide"
atggccctccctgtcaccgccctgctgcttccgctggctcttctgctccacgccgctcggcccgaagtccaactggtggagtccgggggagggctcgtgcagcccggaggcagccttcggctgtcgtgcgccgcctccgggttcacgttctcatcctacgcgatgtcgtgggtcagacaggcaccaggaaagggactggaatgggtgtccgccattagcggctccggcggtagcacctactatgccgactcagtgaagggaaggttcactatctcccgcgacaacagcaagaacaccctgtacctccaaatgaactctctgcgggccgaggataccgcggtgtactattgcgccaagatgggttggtccagcggatacttgggagccttcgacatttggggacagggcactactgtgaccgtgtcctccgggggtggcggatcgggaggcggcggctcgggtggagggggttccgaaatcgtgttgacccagtcaccgggaaccctctcgctgtccccgggagaacgggctacactgtcatgtagagcgtcccagtccgtggcttcctcgttcctggcctggtaccagcagaagccgggacaggcaccccgcctgctcatctacggagccagcggccgggcgaccggcatccctgaccgcttctccggttccggctcgggcaccgactttactctgaccattagcaggcttgagcccgaggattttgccgtgtactactgccaacactacggggggagccctcgcctgaccttcggaggcggaactaaggtcgatatcaaaaccactaccccagcaccgaggccacccaccccggctcctaccatcgcctcccagcctctgtccctgcgtccggaggcatgtagacccgcagctggtggggccgtgcatacccggggtcttgacttcgcctgcgatatctacatttgggcccctctggctggtacttgcggggtcctgctgctttcactcgtgatcactctttactgtaagcgcggtcggaagaagctgctgtacatctttaagcaacccttcatgaggcctgtgcagactactcaagaggaggacggctgttcatgccggttcccagaggaggaggaaggcggctgcgaactgcgcgtgaaattcagccgcagcgcagatgctccagcctacaagcaggggcagaaccagctctacaacgaactcaatcttggtcggagagaggagtacgacgtgctggacaagcggagaggacgggacccagaaatgggcgggaagccgcgcagaaagaatccccaagagggcctgtacaacgagctccaaaaggataagatggcagaagcctatagcgagattggtatgaaaggggaacgcagaagaggcaaaggccacgacggactgtaccagggactcagcaccgccaccaaggacacctatgacgctcttcacatgcaggccctgccgcctcgg

SEQ ID NO: 861-890 - skipped (30 entries)

SEQ ID NO: 891 - protein, 486 aa, Artificial Sequence
  source: /note="Description of Artificial Sequence: Synthetic polypeptide"
MALPVTALLLPLALLLHAARPDIQMTQTTSSLSASLGDRVTISCRASQDISKYLNWYQQKPDGTVKLLIYHTSRLHSGVPSRFSGSGSGTDYSLTISNLEQEDIATYFCQQGNTLPYTFGGGTKLEITGGGGSGGGGSGGGGSEVKLQESGPGLVAPSQSLSVTCTVSGVSLPDYGVSWIRQPPRKGLEWLGVIWGSETTYYNSALKSRLTIIKDNSKSQVFLKMNSLQTDDTAIYYCAKHYYYGGSYAMDYWGQGTSVTVSSTTTPAPRPPTPAPTIASQPLSLRPEACRPAAGGAVHTRGLDFACDIYIWAPLAGTCGVLLLSLVITLYCKRGRKKLLYIFKQPFMRPVQTTQEEDGCSCRFPEEEEGGCELRVKFSRSADAPAYKQGQNQLYNELNLGRREEYDVLDKRRGRDPEMGGKPRRKNPQEGLYNELQKDKMAEAYSEIGMKGERRRGKGHDGLYQGLSTATKDTYDALHMQALPPR

SEQ ID NO: 892 - protein, 465 aa, Artificial Sequence
  source: /note="Description of Artificial Sequence: Synthetic polypeptide"
DIQMTQTTSSLSASLGDRVTISCRASQDISKYLNWYQQKPDGTVKLLIYHTSRLHSGVPSRFSGSGSGTDYSLTISNLEQEDIATYFCQQGNTLPYTFGGGTKLEITGGGGSGGGGSGGGGSEVKLQESGPGLVAPSQSLSVTCTVSGVSLPDYGVSWIRQPPRKGLEWLGVIWGSETTYYNSALKSRLTIIKDNSKSQVFLKMNSLQTDDTAIYYCAKHYYYGGSYAMDYWGQGTSVTVSSTTTPAPRPPTPAPTIASQPLSLRPEACRPAAGGAVHTRGLDFACDIYIWAPLAGTCGVLLLSLVITLYCKRGRKKLLYIFKQPFMRPVQTTQEEDGCSCRFPEEEEGGCELRVKFSRSADAPAYKQGQNQLYNELNLGRREEYDVLDKRRGRDPEMGGKPRRKNPQEGLYNELQKDKMAEAYSEIGMKGERRRGKGHDGLYQGLSTATKDTYDALHMQALPPR

SEQ ID NO: 893 - protein, 242 aa, Artificial Sequence; identical to SEQ ID NO: 357
  source: /note="Description of Artificial Sequence: Synthetic polypeptide"

SEQ ID NO: 894 - DNA, 813 bp, Artificial Sequence
  source: /note="Description of Artificial Sequence: Synthetic polynucleotide"
atggccctccctgtcaccgccctgctgcttccgctggctcttctgctccacgccgctcggcccgaaattgtgatgacccagtcacccgccactcttagcctttcacccggtgagcgcgcaaccctgtcttgcagagcctcccaagacatctcaaaataccttaattggtatcaacagaagcccggacaggctcctcgccttctgatctaccacaccagccggctccattctggaatccctgccaggttcagcggtagcggatctgggaccgactacaccctcactatcagctcactgcagccagaggacttcgctgtctatttctgtcagcaagggaacaccctgccctacacctttggacagggcaccaagctcgagattaaaggtggaggtggcagcggaggaggtgggtccggcggtggaggaagccaggtccaactccaagaaagcggaccgggtcttgtgaagccatcagaaactctttcactgacttgtactgtgagcggagtgtctctccccgattacggggtgtcttggatcagacagccaccggggaagggtctggaatggattggagtgatttggggctctgagactacttactactcttcatccctcaagtcacgcgtcaccatctcaaaggacaactctaagaatcaggtgtcactgaaactgtcatctgtgaccgcagccgacaccgccgtgtactattgcgctaagcattactattatggcgggagctacgcaatggattactggggacagggtactctggtcaccgtgtccagccaccaccatcatcaccatcaccat

SEQ ID NO: 895 - protein, 271 aa, Artificial Sequence
  source: /note="Description of Artificial Sequence: Synthetic polypeptide"
MALPVTALLLPLALLLHAARPEIVMTQSPATLSLSPGERATLSCRASQDISKYLNWYQQKPGQAPRLLIYHTSRLHSGIPARFSGSGSGTDYTLTISSLQPEDFAVYFCQQGNTLPYTFGQGTKLEIKGGGGSGGGGSGGGGSQVQLQESGPGLVKPSETLSLTCTVSGVSLPDYGVSWIRQPPGKGLEWIGVIWGSETTYYSSSLKSRVTISKDNSKNQVSLKLSSVTAADTAVYYCAKHYYYGGSYAMDYWGQGTLVTVSSHHHHHHHH

SEQ ID NO: 896 - DNA, 1458 bp, Artificial Sequence
  source: /note="Description of Artificial Sequence: Synthetic polynucleotide"
atggccctccctgtcaccgccctgctgcttccgctggctcttctgctccacgccgctcggcccgaaattgtgatgacccagtcacccgccactcttagcctttcacccggtgagcgcgcaaccctgtcttgcagagcctcccaagacatctcaaaataccttaattggtatcaacagaagcccggacaggctcctcgccttctgatctaccacaccagccggctccattctggaatccctgccaggttcagcggtagcggatctgggaccgactacaccctcactatcagctcactgcagccagaggacttcgctgtctatttctgtcagcaagggaacaccctgccctacacctttggacagggcaccaagctcgagattaaaggtggaggtggcagcggaggaggtgggtccggcggtggaggaagccaggtccaactccaagaaagcggaccgggtcttgtgaagccatcagaaactctttcactgacttgtactgtgagcggagtgtctctccccgattacggggtgtcttggatcagacagccaccggggaagggtctggaatggattggagtgatttggggctctgagactacttactactcttcatccctcaagtcacgcgtcaccatctcaaaggacaactctaagaatcaggtgtcactgaaactgtcatctgtgaccgcagccgacaccgccgtgtactattgcgctaagcattactattatggcgggagctacgcaatggattactggggacagggtactctggtcaccgtgtccagcaccactaccccagcaccgaggccacccaccccggctcctaccatcgcctcccagcctctgtccctgcgtccggaggcatgtagacccgcagctggtggggccgtgcatacccggggtcttgacttcgcctgcgatatctacatttgggcccctctggctggtacttgcggggtcctgctgctttcactcgtgatcactctttactgtaagcgcggtcggaagaagctgctgtacatctttaagcaacccttcatgaggcctgtgcagactactcaagaggaggacggctgttcatgccggttcccagaggaggaggaaggcggctgcgaactgcgcgtgaaattcagccgcagcgcagatgctccagcctacaagcaggggcagaaccagctctacaacgaactcaatcttggtcggagagaggagtacgacgtgctggacaagcggagaggacgggacccagaaatgggcgggaagccgcgcagaaagaatccccaagagggcctgtacaacgagctccaaaaggataagatggcagaagcctatagcgagattggtatgaaaggggaacgcagaagaggcaaaggccacgacggactgtaccagggactcagcaccgccaccaaggacacctatgacgctcttcacatgcaggccctgccgcctcgg

SEQ ID NO: 897 - protein, 486 aa, Artificial Sequence
  source: /note="Description of Artificial Sequence: Synthetic polypeptide"
MALPVTALLLPLALLLHAARPEIVMTQSPATLSLSPGERATLSCRASQDISKYLNWYQQKPGQAPRLLIYHTSRLHSGIPARFSGSGSGTDYTLTISSLQPEDFAVYFCQQGNTLPYTFGQGTKLEIKGGGGSGGGGSGGGGSQVQLQESGPGLVKPSETLSLTCTVSGVSLPDYGVSWIRQPPGKGLEWIGVIWGSETTYYSSSLKSRVTISKDNSKNQVSLKLSSVTAADTAVYYCAKHYYYGGSYAMDYWGQGTLVTVSSTTTPAPRPPTPAPTIASQPLSLRPEACRPAAGGAVHTRGLDFACDIYIWAPLAGTCGVLLLSLVITLYCKRGRKKLLYIFKQPFMRPVQTTQEEDGCSCRFPEEEEGGCELRVKFSRSADAPAYKQGQNQLYNELNLGRREEYDVLDKRRGRDPEMGGKPRRKNPQEGLYNELQKDKMAEAYSEIGMKGERRRGKGHDGLYQGLSTATKDTYDALHMQALPPR

SEQ ID NO: 898 - protein, 242 aa, Artificial Sequence; identical to SEQ ID NO: 358
  source: /note="Description of Artificial Sequence: Synthetic polypeptide"

SEQ ID NO: 899 - DNA, 813 bp, Artificial Sequence
  source: /note="Description of Artificial Sequence: Synthetic polynucleotide"
atggccctccctgtcaccgccctgctgcttccgctggctcttctgctccacgccgctcggcccgaaattgtgatgacccagtcacccgccactcttagcctttcacccggtgagcgcgcaaccctgtcttgcagagcctcccaagacatctcaaaataccttaattggtatcaacagaagcccggacaggctcctcgccttctgatctaccacaccagccggctccattctggaatccctgccaggttcagcggtagcggatctgggaccgactacaccctcactatcagctcactgcagccagaggacttcgctgtctatttctgtcagcaagggaacaccctgccctacacctttggacagggcaccaagctcgagattaaaggtggaggtggcagcggaggaggtgggtccggcggtggaggaagccaggtccaactccaagaaagcggaccgggtcttgtgaagccatcagaaactctttcactgacttgtactgtgagcggagtgtctctccccgattacggggtgtcttggatcagacagccaccggggaagggtctggaatggattggagtgatttggggctctgagactacttactaccaatcatccctcaagtcacgcgtcaccatctcaaaggacaactctaagaatcaggtgtcactgaaactgtcatctgtgaccgcagccgacaccgccgtgtactattgcgctaagcattactattatggcgggagctacgcaatggattactggggacagggtactctggtcaccgtgtccagccaccaccatcatcaccatcaccat

SEQ ID NO: 900 - protein, 271 aa, Artificial Sequence
  source: /note="Description of Artificial Sequence: Synthetic polypeptide"
MALPVTALLLPLALLLHAARPEIVMTQSPATLSLSPGERATLSCRASQDISKYLNWYQQKPGQAPRLLIYHTSRLHSGIPARFSGSGSGTDYTLTISSLQPEDFAVYFCQQGNTLPYTFGQGTKLEIKGGGGSGGGGSGGGGSQVQLQESGPGLVKPSETLSLTCTVSGVSLPDYGVSWIRQPPGKGLEWIGVIWGSETTYYQSSLKSRVTISKDNSKNQVSLKLSSVTAADTAVYYCAKHYYYGGSYAMDYWGQGTLVTVSSHHHHHHHH

SEQ ID NO: 901 - DNA, 1458 bp, Artificial Sequence
  source: /note="Description of Artificial Sequence: Synthetic polynucleotide"
atggccctccctgtcaccgccctgctgcttccgctggctcttctgctccacgccgctcggcccgaaattgtgatgacccagtcacccgccactcttagcctttcacccggtgagcgcgcaaccctgtcttgcagagcctcccaagacatctcaaaataccttaattggtatcaacagaagcccggacaggctcctcgccttctgatctaccacaccagccggctccattctggaatccctgccaggttcagcggtagcggatctgggaccgactacaccctcactatcagctcactgcagccagaggacttcgctgtctatttctgtcagcaagggaacaccctgccctacacctttggacagggcaccaagctcgagattaaaggtggaggtggcagcggaggaggtgggtccggcggtggaggaagccaggtccaactccaagaaagcggaccgggtcttgtgaagccatcagaaactctttcactgacttgtactgtgagcggagtgtctctccccgattacggggtgtcttggatcagacagccaccggggaagggtctggaatggattggagtgatttggggctctgagactacttactaccaatcatccctcaagtcacgcgtcaccatctcaaaggacaactctaagaatcaggtgtcactgaaactgtcatctgtgaccgcagccgacaccgccgtgtactattgcgctaagcattactattatggcgggagctacgcaatggattactggggacagggtactctggtcaccgtgtccagcaccactaccccagcaccgaggccacccaccccggctcctaccatcgcctcccagcctctgtccctgcgtccggaggcatgtagacccgcagctggtggggccgtgcatacccggggtcttgacttcgcctgcgatatctacatttgggcccctctggctggtacttgcggggtcctgctgctttcactcgtgatcactctttactgtaagcgcggtcggaagaagctgctgtacatctttaagcaacccttcatgaggcctgtgcagactactcaagaggaggacggctgttcatgccggttcccagaggaggaggaaggcggctgcgaactgcgcgtgaaattcagccgcagcgcagatgctccagcctacaagcaggggcagaaccagctctacaacgaactcaatcttggtcggagagaggagtacgacgtgctggacaagcggagaggacgggacccagaaatgggcgggaagccgcgcagaaagaatccccaagagggcctgtacaacgagctccaaaaggataagatggcagaagcctatagcgagattggtatgaaaggggaacgcagaagaggcaaaggccacgacggactgtaccagggactcagcaccgccaccaaggacacctatgacgctcttcacatgcaggccctgccgcctcgg

SEQ ID NO: 902 - protein, 486 aa, Artificial Sequence
  source: /note="Description of Artificial Sequence: Synthetic polypeptide"
MALPVTALLLPLALLLHAARPEIVMTQSPATLSLSPGERATLSCRASQDISKYLNWYQQKPGQAPRLLIYHTSRLHSGIPARFSGSGSGTDYTLTISSLQPEDFAVYFCQQGNTLPYTFGQGTKLEIKGGGGSGGGGSGGGGSQVQLQESGPGLVKPSETLSLTCTVSGVSLPDYGVSWIRQPPGKGLEWIGVIWGSETTYYQSSLKSRVTISKDNSKNQVSLKLSSVTAADTAVYYCAKHYYYGGSYAMDYWGQGTLVTVSSTTTPAPRPPTPAPTIASQPLSLRPEACRPAAGGAVHTRGLDFACDIYIWAPLAGTCGVLLLSLVITLYCKRGRKKLLYIFKQPFMRPVQTTQEEDGCSCRFPEEEEGGCELRVKFSRSADAPAYKQGQNQLYNELNLGRREEYDVLDKRRGRDPEMGGKPRRKNPQEGLYNELQKDKMAEAYSEIGMKGERRRGKGHDGLYQGLSTATKDTYDALHMQALPPR

SEQ ID NO: 903 - protein, 242 aa, Artificial Sequence; identical to SEQ ID NO: 359
  source: /note="Description of Artificial Sequence: Synthetic polypeptide"

SEQ ID NO: 904 - DNA, 813 bp, Artificial Sequence
  source: /note="Description of Artificial Sequence: Synthetic polynucleotide"
atggctctgcccgtgaccgcactcctcctgccactggctctgctgcttcacgccgctcgcccacaagtccagcttcaagaatcagggcctggtctggtgaagccatctgagactctgtccctcacttgcaccgtgagcggagtgtccctcccagactacggagtgagctggattagacagcctcccggaaagggactggagtggatcggagtgatttggggtagcgaaaccacttactattcatcttccctgaagtcacgggtcaccatttcaaaggataactcaaagaatcaagtgagcctcaagctctcatcagtcaccgccgctgacaccgccgtgtattactgtgccaagcattactactatggagggtcctacgccatggactactggggccagggaactctggtcactgtgtcatctggtggaggaggtagcggaggaggcgggagcggtggaggtggctccgaaatcgtgatgacccagagccctgcaaccctgtccctttctcccggggaacgggctaccctttcttgtcgggcatcacaagatatctcaaaatacctcaattggtatcaacagaagccgggacaggcccctaggcttcttatctaccacacctctcgcctgcatagcgggattcccgcacgctttagcgggtctggaagcgggaccgactacactctgaccatctcatctctccagcccgaggacttcgccgtctacttctgccagcagggtaacaccctgccgtacaccttcggccagggcaccaagcttgagatcaaacatcaccaccatcatcaccatcac

SEQ ID NO: 905 - protein, 271 aa, Artificial Sequence
  source: /note="Description of Artificial Sequence: Synthetic polypeptide"
MALPVTALLLPLALLLHAARPQVQLQESGPGLVKPSETLSLTCTVSGVSLPDYGVSWIRQPPGKGLEWIGVIWGSETTYYSSSLKSRVTISKDNSKNQVSLKLSSVTAADTAVYYCAKHYYYGGSYAMDYWGQGTLVTVSSGGGGSGGGGSGGGGSEIVMTQSPATLSLSPGERATLSCRASQDISKYLNWYQQKPGQAPRLLIYHTSRLHSGIPARFSGSGSGTDYTLTISSLQPEDFAVYFCQQGNTLPYTFGQGTKLEIKHHHHHHHH

SEQ ID NO: 906 - DNA, 1458 bp, Artificial Sequence
  source: /note="Description of Artificial Sequence: Synthetic polynucleotide"
atggctctgcccgtgaccgcactcctcctgccactggctctgctgcttcacgccgctcgcccacaagtccagcttcaagaatcagggcctggtctggtgaagccatctgagactctgtccctcacttgcaccgtgagcggagtgtccctcccagactacggagtgagctggattagacagcctcccggaaagggactggagtggatcggagtgatttggggtagcgaaaccacttactattcatcttccctgaagtcacgggtcaccatttcaaaggataactcaaagaatcaagtgagcctcaagctctcatcagtcaccgccgctgacaccgccgtgtattactgtgccaagcattactactatggagggtcctacgccatggactactggggccagggaactctggtcactgtgtcatctggtggaggaggtagcggaggaggcgggagcggtggaggtggctccgaaatcgtgatgacccagagccctgcaaccctgtccctttctcccggggaacgggctaccctttcttgtcgggcatcacaagatatctcaaaatacctcaattggtatcaacagaagccgggacaggcccctaggcttcttatctaccacacctctcgcctgcatagcgggattcccgcacgctttagcgggtctggaagcgggaccgactacactctgaccatctcatctctccagcccgaggacttcgccgtctacttctgccagcagggtaacaccctgccgtacaccttcggccagggcaccaagcttgagatcaaaaccactactcccgctccaaggccacccacccctgccccgaccatcgcctctcagccgctttccctgcgtccggaggcatgtagacccgcagctggtggggccgtgcatacccggggtcttgacttcgcctgcgatatctacatttgggcccctctggctggtacttgcggggtcctgctgctttcactcgtgatcactctttactgtaagcgcggtcggaagaagctgctgtacatctttaagcaacccttcatgaggcctgtgcagactactcaagaggaggacggctgttcatgccggttcccagaggaggaggaaggcggctgcgaactgcgcgtgaaattcagccgcagcgcagatgctccagcctacaagcaggggcagaaccagctctacaacgaactcaatcttggtcggagagaggagtacgacgtgctggacaagcggagaggacgggacccagaaatgggcgggaagccgcgcagaaagaatccccaagagggcctgtacaacgagctccaaaaggataagatggcagaagcctatagcgagattggtatgaaaggggaacgcagaagaggcaaaggccacgacggactgtaccagggactcagcaccgccaccaaggacacctatgacgctcttcacatgcaggccctgccgcctcgg

SEQ ID NO: 907 - protein, 486 aa, Artificial Sequence
  source: /note="Description of Artificial Sequence: Synthetic polypeptide"
MALPVTALLLPLALLLHAARPQVQLQESGPGLVKPSETLSLTCTVSGVSLPDYGVSWIRQPPGKGLEWIGVIWGSETTYYSSSLKSRVTISKDNSKNQVSLKLSSVTAADTAVYYCAKHYYYGGSYAMDYWGQGTLVTVSSGGGGSGGGGSGGGGSEIVMTQSPATLSLSPGERATLSCRASQDISKYLNWYQQKPGQAPRLLIYHTSRLHSGIPARFSGSGSGTDYTLTISSLQPEDFAVYFCQQGNTLPYTFGQGTKLEIKTTTPAPRPPTPAPTIASQPLSLRPEACRPAAGGAVHTRGLDFACDIYIWAPLAGTCGVLLLSLVITLYCKRGRKKLLYIFKQPFMRPVQTTQEEDGCSCRFPEEEEGGCELRVKFSRSADAPAYKQGQNQLYNELNLGRREEYDVLDKRRGRDPEMGGKPRRKNPQEGLYNELQKDKMAEAYSEIGMKGERRRGKGHDGLYQGLSTATKDTYDALHMQALPPR

SEQ ID NO: 908 - protein, 242 aa, Artificial Sequence; identical to SEQ ID NO: 360
  source: /note="Description of Artificial Sequence: Synthetic polypeptide"

SEQ ID NO: 909 - DNA, 813 bp, Artificial Sequence
  source: /note="Description of Artificial Sequence: Synthetic polynucleotide"
atggctctgcccgtgaccgcactcctcctgccactggctctgctgcttcacgccgctcgcccacaagtccagcttcaagaatcagggcctggtctggtgaagccatctgagactctgtccctcacttgcaccgtgagcggagtgtccctcccagactacggagtgagctggattagacagcctcccggaaagggactggagtggatcggagtgatttggggtagcgaaaccacttactatcaatcttccctgaagtcacgggtcaccatttcaaaggataactcaaagaatcaagtgagcctcaagctctcatcagtcaccgccgctgacaccgccgtgtattactgtgccaagcattactactatggagggtcctacgccatggactactggggccagggaactctggtcactgtgtcatctggtggaggaggtagcggaggaggcgggagcggtggaggtggctccgaaatcgtgatgacccagagccctgcaaccctgtccctttctcccggggaacgggctaccctttcttgtcgggcatcacaagatatctcaaaatacctcaattggtatcaacagaagccgggacaggcccctaggcttcttatctaccacacctctcgcctgcatagcgggattcccgcacgctttagcgggtctggaagcgggaccgactacactctgaccatctcatctctccagcccgaggacttcgccgtctacttctgccagcagggtaacaccctgccgtacaccttcggccagggcaccaagcttgagatcaaacatcaccaccatcatcaccatcac

SEQ ID NO: 910 - protein, 271 aa, Artificial Sequence
  source: /note="Description of Artificial Sequence: Synthetic polypeptide"
MALPVTALLLPLALLLHAARPQVQLQESGPGLVKPSETLSLTCTVSGVSLPDYGVSWIRQPPGKGLEWIGVIWGSETTYYQSSLKSRVTISKDNSKNQVSLKLSSVTAADTAVYYCAKHYYYGGSYAMDYWGQGTLVTVSSGGGGSGGGGSGGGGSEIVMTQSPATLSLSPGERATLSCRASQDISKYLNWYQQKPGQAPRLLIYHTSRLHSGIPARFSGSGSGTDYTLTISSLQPEDFAVYFCQQGNTLPYTFGQGTKLEIKHHHHHHHH

SEQ ID NO: 911 - DNA, 1458 bp, Artificial Sequence
  source: /note="Description of Artificial Sequence: Synthetic polynucleotide"
atggctctgcccgtgaccgcactcctcctgccactggctctgctgcttcacgccgctcgcccacaagtccagcttcaagaatcagggcctggtctggtgaagccatctgagactctgtccctcacttgcaccgtgagcggagtgtccctcccagactacggagtgagctggattagacagcctcccggaaagggactggagtggatcggagtgatttggggtagcgaaaccacttactatcaatcttccctgaagtcacgggtcaccatttcaaaggataactcaaagaatcaagtgagcctcaagctctcatcagtcaccgccgctgacaccgccgtgtattactgtgccaagcattactactatggagggtcctacgccatggactactggggccagggaactctggtcactgtgtcatctggtggaggaggtagcggaggaggcgggagcggtggaggtggctccgaaatcgtgatgacccagagccctgcaaccctgtccctttctcccggggaacgggctaccctttcttgtcgggcatcacaagatatctcaaaatacctcaattggtatcaacagaagccgggacaggcccctaggcttcttatctaccacacctctcgcctgcatagcgggattcccgcacgctttagcgggtctggaagcgggaccgactacactctgaccatctcatctctccagcccgaggacttcgccgtctacttctgccagcagggtaacaccctgccgtacaccttcggccagggcaccaagcttgagatcaaaaccactactcccgctccaaggccacccacccctgccccgaccatcgcctctcagccgctttccctgcgtccggaggcatgtagacccgcagctggtggggccgtgcatacccggggtcttgacttcgcctgcgatatctacatttgggcccctctggctggtacttgcggggtcctgctgctttcactcgtgatcactctttactgtaagcgcggtcggaagaagctgctgtacatctttaagcaacccttcatgaggcctgtgcagactactcaagaggaggacggctgttcatgccggttcccagaggaggaggaaggcggctgcgaactgcgcgtgaaattcagccgcagcgcagatgctccagcctacaagcaggggcagaaccagctctacaacgaactcaatcttggtcggagagaggagtacgacgtgctggacaagcggagaggacgggacccagaaatgggcgggaagccgcgcagaaagaatccccaagagggcctgtacaacgagctccaaaaggataagatggcagaagcctatagcgagattggtatgaaaggggaacgcagaagaggcaaaggccacgacggactgtaccagggactcagcaccgccaccaaggacacctatgacgctcttcacatgcaggccctgccgcctcgg

SEQ ID NO: 912 - protein, 486 aa, Artificial Sequence
  source: /note="Description of Artificial Sequence: Synthetic polypeptide"
MALPVTALLLPLALLLHAARPQVQLQESGPGLVKPSETLSLTCTVSGVSLPDYGVSWIRQPPGKGLEWIGVIWGSETTYYQSSLKSRVTISKDNSKNQVSLKLSSVTAADTAVYYCAKHYYYGGSYAMDYWGQGTLVTVSSGGGGSGGGGSGGGGSEIVMTQSPATLSLSPGERATLSCRASQDISKYLNWYQQKPGQAPRLLIYHTSRLHSGIPARFSGSGSGTDYTLTISSLQPEDFAVYFCQQGNTLPYTFGQGTKLEIKTTTPAPRPPTPAPTIASQPLSLRPEACRPAAGGAVHTRGLDFACDIYIWAPLAGTCGVLLLSLVITLYCKRGRKKLLYIFKQPFMRPVQTTQEEDGCSCRFPEEEEGGCELRVKFSRSADAPAYKQGQNQLYNELNLGRREEYDVLDKRRGRDPEMGGKPRRKNPQEGLYNELQKDKMAEAYSEIGMKGERRRGKGHDGLYQGLSTATKDTYDALHMQALPPR

SEQ ID NO: 913 - protein, 247 aa, Artificial Sequence; identical to SEQ ID NO: 361
  source: /note="Description of Artificial Sequence: Synthetic polypeptide"

SEQ ID NO: 914 - DNA, 828 bp, Artificial Sequence
  source: /note="Description of Artificial Sequence: Synthetic polynucleotide"
atggccctcccagtgaccgctctgctgctgcctctcgcacttcttctccatgccgctcggcctgagatcgtcatgacccaaagccccgctaccctgtccctgtcacccggcgagagggcaaccctttcatgcagggccagccaggacatttctaagtacctcaactggtatcagcagaagccagggcaggctcctcgcctgctgatctaccacaccagccgcctccacagcggtatccccgccagattttccgggagcgggtctggaaccgactacaccctcaccatctcttctctgcagcccgaggatttcgccgtctatttctgccagcaggggaatactctgccgtacaccttcggtcaaggtaccaagctggaaatcaagggaggcggaggatcaggcggtggcggaagcggaggaggtggctccggaggaggaggttcccaagtgcagcttcaagaatcaggacccggacttgtgaagccatcagaaaccctctccctgacttgtaccgtgtccggtgtgagcctccccgactacggagtctcttggattcgccagcctccggggaagggtcttgaatggattggggtgatttggggatcagagactacttactactcttcatcacttaagtcacgggtcaccatcagcaaagataatagcaagaaccaagtgtcacttaagctgtcatctgtgaccgccgctgacaccgccgtgtactattgtgccaaacattactattacggagggtcttatgctatggactactggggacaggggaccctggtgactgtctctagccatcaccatcaccaccatcatcac

SEQ ID NO: 915 - protein, 276 aa, Artificial Sequence
  source: /note="Description of Artificial Sequence: Synthetic polypeptide"
MALPVTALLLPLALLLHAARPEIVMTQSPATLSLSPGERATLSCRASQDISKYLNWYQQKPGQAPRLLIYHTSRLHSGIPARFSGSGSGTDYTLTISSLQPEDFAVYFCQQGNTLPYTFGQGTKLEIKGGGGSGGGGSGGGGSGGGGSQVQLQESGPGLVKPSETLSLTCTVSGVSLPDYGVSWIRQPPGKGLEWIGVIWGSETTYYSSSLKSRVTISKDNSKNQVSLKLSSVTAADTAVYYCAKHYYYGGSYAMDYWGQGTLVTVSSHHHHHHHH

SEQ ID NO: 916 - DNA, 1473 bp, Artificial Sequence
  source: /note="Description of Artificial Sequence: Synthetic polynucleotide"
atggccctccctgtcaccgccctgctgcttccgctggctcttctgctccacgccgctcggcccgaaattgtgatgacccagtcacccgccactcttagcctttcacccggtgagcgcgcaaccctgtcttgcagagcctcccaagacatctcaaaataccttaattggtatcaacagaagcccggacaggctcctcgccttctgatctaccacaccagccggctccattctggaatccctgccaggttcagcggtagcggatctgggaccgactacaccctcactatcagctcactgcagccagaggacttcgctgtctatttctgtcagcaagggaacaccctgccctacacctttggacagggcaccaagctcgagattaaaggtggaggtggcagcggaggaggtgggtccggcggtggaggaagcggcggaggcgggagccaggtccaactccaagaaagcggaccgggtcttgtgaagccatcagaaactctttcactgacttgtactgtgagcggagtgtctctccccgattacggggtgtcttggatcagacagccaccggggaagggtctggaatggattggagtgatttggggctctgagactacttactactcttcatccctcaagtcacgcgtcaccatctcaaaggacaactctaagaatcaggtgtcactgaaactgtcatctgtgaccgcagccgacaccgccgtgtactattgcgctaagcattactattatggcgggagctacgcaatggattactggggacagggtactctggtcaccgtgtccagcaccactaccccagcaccgaggccacccaccccggctcctaccatcgcctcccagcctctgtccctgcgtccggaggcatgtagacccgcagctggtggggccgtgcatacccggggtcttgacttcgcctgcgatatctacatttgggcccctctggctggtacttgcggggtcctgctgctttcactcgtgatcactctttactgtaagcgcggtcggaagaagctgctgtacatctttaagcaacccttcatgaggcctgtgcagactactcaagaggaggacggctgttcatgccggttcccagaggaggaggaaggcggctgcgaactgcgcgtgaaattcagccgcagcgcagatgctccagcctacaagcaggggcagaaccagctctacaacgaactcaatcttggtcggagagaggagtacgacgtgctggacaagcggagaggacgggacccagaaatgggcgggaagccgcgcagaaagaatccccaagagggcctgtacaacgagctccaaaaggataagatggcagaagcctatagcgagattggtatgaaaggggaacgcagaagaggcaaaggccacgacggactgtaccagggactcagcaccgccaccaaggacacctatgacgctcttcacatgcaggccctgccgcctcgg

SEQ ID NO: 917 - protein, 491 aa, Artificial Sequence
  source: /note="Description of Artificial Sequence: Synthetic polypeptide"
MALPVTALLLPLALLLHAARPEIVMTQSPATLSLSPGERATLSCRASQDISKYLNWYQQKPGQAPRLLIYHTSRLHSGIPARFSGSGSGTDYTLTISSLQPEDFAVYFCQQGNTLPYTFGQGTKLEIKGGGGSGGGGSGGGGSGGGGSQVQLQESGPGLVKPSETLSLTCTVSGVSLPDYGVSWIRQPPGKGLEWIGVIWGSETTYYSSSLKSRVTISKDNSKNQVSLKLSSVTAADTAVYYCAKHYYYGGSYAMDYWGQGTLVTVSSTTTPAPRPPTPAPTIASQPLSLRPEACRPAAGGAVHTRGLDFACDIYIWAPLAGTCGVLLLSLVITLYCKRGRKKLLYIFKQPFMRPVQTTQEEDGCSCRFPEEEEGGCELRVKFSRSADAPAYKQGQNQLYNELNLGRREEYDVLDKRRGRDPEMGGKPRRKNPQEGLYNELQKDKMAEAYSEIGMKGERRRGKGHDGLYQGLSTATKDTYDALHMQALPPR

SEQ ID NO: 918 - protein, 247 aa, Artificial Sequence; identical to SEQ ID NO: 362
  source: /note="Description of Artificial Sequence: Synthetic polypeptide"

SEQ ID NO: 919 - DNA, 828 bp, Artificial Sequence
  source: /note="Description of Artificial Sequence: Synthetic polynucleotide"
atggccctcccagtgaccgctctgctgctgcctctcgcacttcttctccatgccgctcggcctgagatcgtcatgacccaaagccccgctaccctgtccctgtcacccggcgagagggcaaccctttcatgcagggccagccaggacatttctaagtacctcaactggtatcagcagaagccagggcaggctcctcgcctgctgatctaccacaccagccgcctccacagcggtatccccgccagattttccgggagcgggtctggaaccgactacaccctcaccatctcttctctgcagcccgaggatttcgccgtctatttctgccagcaggggaatactctgccgtacaccttcggtcaaggtaccaagctggaaatcaagggaggcggaggatcaggcggtggcggaagcggaggaggtggctccggaggaggaggttcccaagtgcagcttcaagaatcaggacccggacttgtgaagccatcagaaaccctctccctgacttgtaccgtgtccggtgtgagcctccccgactacggagtctcttggattcgccagcctccggggaagggtcttgaatggattggggtgatttggggatcagagactacttactaccagtcatcacttaagtcacgggtcaccatcagcaaagataatagcaagaaccaagtgtcacttaagctgtcatctgtgaccgccgctgacaccgccgtgtactattgtgccaaacattactattacggagggtcttatgctatggactactggggacaggggaccctggtgactgtctctagccatcaccatcaccaccatcatcac

SEQ ID NO: 920 - protein, 276 aa, Artificial Sequence
  source: /note="Description of Artificial Sequence: Synthetic polypeptide"
MALPVTALLLPLALLLHAARPEIVMTQSPATLSLSPGERATLSCRASQDISKYLNWYQQKPGQAPRLLIYHTSRLHSGIPARFSGSGSGTDYTLTISSLQPEDFAVYFCQQGNTLPYTFGQGTKLEIKGGGGSGGGGSGGGGSGGGGSQVQLQESGPGLVKPSETLSLTCTVSGVSLPDYGVSWIRQPPGKGLEWIGVIWGSETTYYQSSLKSRVTISKDNSKNQVSLKLSSVTAADTAVYYCAKHYYYGGSYAMDYWGQGTLVTVSSHHHHHHHH

SEQ ID NO: 921 - DNA, 1473 bp, Artificial Sequence
  source: /note="Description of Artificial Sequence: Synthetic polynucleotide"
atggccctccctgtcaccgccctgctgcttccgctggctcttctgctccacgccgctcggcccgaaattgtgatgacccagtcacccgccactcttagcctttcacccggtgagcgcgcaaccctgtcttgcagagcctcccaagacatctcaaaataccttaattggtatcaacagaagcccggacaggctcctcgccttctgatctaccacaccagccggctccattctggaatccctgccaggttcagcggtagcggatctgggaccgactacaccctcactatcagctcactgcagccagaggacttcgctgtctatttctgtcagcaagggaacaccctgccctacacctttggacagggcaccaagctcgagattaaaggtggaggtggcagcggaggaggtgggtccggcggtggaggaagcggaggcggagggagccaggtccaactccaagaaagcggaccgggtcttgtgaagccatcagaaactctttcactgacttgtactgtgagcggagtgtctctccccgattacggggtgtcttggatcagacagccaccggggaagggtctggaatggattggagtgatttggggctctgagactacttactaccaatcatccctcaagtcacgcgtcaccatctcaaaggacaactctaagaatcaggtgtcactgaaactgtcatctgtgaccgcagccgacaccgccgtgtactattgcgctaagcattactattatggcgggagctacgcaatggattactggggacagggtactctggtcaccgtgtccagcaccactaccccagcaccgaggccacccaccccggctcctaccatcgcctcccagcctctgtccctgcgtccggaggcatgtagacccgcagctggtggggccgtgcatacccggggtcttgacttcgcctgcgatatctacatttgggcccctctggctggtacttgcggggtcctgctgctttcactcgtgatcactctttactgtaagcgcggtcggaagaagctgctgtacatctttaagcaacccttcatgaggcctgtgcagactactcaagaggaggacggctgttcatgccggttcccagaggaggaggaaggcggctgcgaactgcgcgtgaaattcagccgcagcgcagatgctccagcctacaagcaggggcagaaccagctctacaacgaactcaatcttggtcggagagaggagtacgacgtgctggacaagcggagaggacgggacccagaaatgggcgggaagccgcgcagaaagaatccccaagagggcctgtacaacgagctccaaaaggataagatggcagaagcctatagcgagattggtatgaaaggggaacgcagaagaggcaaaggccacgacggactgtaccagggactcagcaccgccaccaaggacacctatgacgctcttcacatgcaggccctgccgcctcgg

SEQ ID NO: 922 - protein, 491 aa, Artificial Sequence
  source: /note="Description of Artificial Sequence: Synthetic polypeptide"
MALPVTALLLPLALLLHAARPEIVMTQSPATLSLSPGERATLSCRASQDISKYLNWYQQKPGQAPRLLIYHTSRLHSGIPARFSGSGSGTDYTLTISSLQPEDFAVYFCQQGNTLPYTFGQGTKLEIKGGGGSGGGGSGGGGSGGGGSQVQLQESGPGLVKPSETLSLTCTVSGVSLPDYGVSWIRQPPGKGLEWIGVIWGSETTYYQSSLKSRVTISKDNSKNQVSLKLSSVTAADTAVYYCAKHYYYGGSYAMDYWGQGTLVTVSSTTTPAPRPPTPAPTIASQPLSLRPEACRPAAGGAVHTRGLDFACDIYIWAPLAGTCGVLLLSLVITLYCKRGRKKLLYIFKQPFMRPVQTTQEEDGCSCRFPEEEEGGCELRVKFSRSADAPAYKQGQNQLYNELNLGRREEYDVLDKRRGRDPEMGGKPRRKNPQEGLYNELQKDKMAEAYSEIGMKGERRRGKGHDGLYQGLSTATKDTYDALHMQALPPR

SEQ ID NO: 923 - protein, 247 aa, Artificial Sequence; identical to SEQ ID NO: 363
  source: /note="Description of Artificial Sequence: Synthetic polypeptide"

SEQ ID NO: 924 - DNA, 828 bp, Artificial Sequence
  source: /note="Description of Artificial Sequence: Synthetic polynucleotide"
atggcactgcctgtcactgccctcctgctgcctctggccctccttctgcatgccgccaggccccaagtccagctgcaagagtcaggacccggactggtgaagccgtctgagactctctcactgacttgtaccgtcagcggcgtgtccctccccgactacggagtgtcatggatccgccaacctcccgggaaagggcttgaatggattggtgtcatctggggttctgaaaccacctactactcatcttccctgaagtccagggtgaccatcagcaaggataattccaagaaccaggtcagccttaagctgtcatctgtgaccgctgctgacaccgccgtgtattactgcgccaagcactactattacggaggaagctacgctatggactattggggacagggcactctcgtgactgtgagcagcggcggtggagggtctggaggtggaggatccggtggtggtgggtcaggcggaggagggagcgagattgtgatgactcagtcaccagccaccctttctctttcacccggcgagagagcaaccctgagctgtagagccagccaggacatttctaagtacctcaactggtatcagcaaaaaccggggcaggcccctcgcctcctgatctaccatacctcacgccttcactctggtatccccgctcggtttagcggatcaggatctggtaccgactacactctgaccatttccagcctgcagccagaagatttcgcagtgtatttctgccagcagggcaatacccttccttacaccttcggtcagggaaccaagctcgaaatcaagcaccatcaccatcatcaccaccat

SEQ ID NO: 925 - protein, 276 aa, Artificial Sequence
  source: /note="Description of Artificial Sequence: Synthetic polypeptide"
MALPVTALLLPLALLLHAARPQVQLQESGPGLVKPSETLSLTCTVSGVSLPDYGVSWIRQPPGKGLEWIGVIWGSETTYYSSSLKSRVTISKDNSKNQVSLKLSSVTAADTAVYYCAKHYYYGGSYAMDYWGQGTLVTVSSGGGGSGGGGSGGGGSGGGGSEIVMTQSPATLSLSPGERATLSCRASQDISKYLNWYQQKPGQAPRLLIYHTSRLHSGIPARFSGSGSGTDYTLTISSLQPEDFAVYFCQQGNTLPYTFGQGTKLEIKHHHHHHHH

SEQ ID NO: 926 - DNA, 1473 bp, Artificial Sequence
  source: /note="Description of Artificial Sequence: Synthetic polynucleotide"
atggctctgcccgtgaccgcactcctcctgccactggctctgctgcttcacgccgctcgcccacaagtccagcttcaagaatcagggcctggtctggtgaagccatctgagactctgtccctcacttgcaccgtgagcggagtgtccctcccagactacggagtgagctggattagacagcctcccggaaagggactggagtggatcggagtgatttggggtagcgaaaccacttactattcatcttccctgaagtcacgggtcaccatttcaaaggataactcaaagaatcaagtgagcctcaagctctcatcagtcaccgccgctgacaccgccgtgtattactgtgccaagcattactactatggagggtcctacgccatggactactggggccagggaactctggtcactgtgtcatctggtggaggaggtagcggaggaggcgggagcggtggaggtggctccggaggtggcggaagcgaaatcgtgatgacccagagccctgcaaccctgtccctttctcccggggaacgggctaccctttcttgtcgggcatcacaagatatctcaaaatacctcaattggtatcaacagaagccgggacaggcccctaggcttcttatctaccacacctctcgcctgcatagcgggattcccgcacgctttagcgggtctggaagcgggaccgactacactctgaccatctcatctctccagcccgaggacttcgccgtctacttctgccagcagggtaacaccctgccgtacaccttcggccagggcaccaagcttgagatcaaaaccactactcccgctccaaggccacccacccctgccccgaccatcgcctctcagccgctttccctgcgtccggaggcatgtagacccgcagctggtggggccgtgcatacccggggtcttgacttcgcctgcgatatctacatttgggcccctctggctggtacttgcggggtcctgctgctttcactcgtgatcactctttactgtaagcgcggtcggaagaagctgctgtacatctttaagcaacccttcatgaggcctgtgcagactactcaagaggaggacggctgttcatgccggttcccagaggaggaggaaggcggctgcgaactgcgcgtgaaattcagccgcagcgcagatgctccagcctacaagcaggggcagaaccagctctacaacgaactcaatcttggtcggagagaggagtacgacgtgctggacaagcggagaggacgggacccagaaatgggcgggaagccgcgcagaaagaatccccaagagggcctgtacaacgagctccaaaaggataagatggcagaagcctatagcgagattggtatgaaaggggaacgcagaagaggcaaaggccacgacggactgtaccagggactcagcaccgccaccaaggacacctatgacgctcttcacatgcaggccctgccgcctcgg

SEQ ID NO: 927 - protein, 491 aa, Artificial Sequence
  source: /note="Description of Artificial Sequence: Synthetic polypeptide"
MALPVTALLLPLALLLHAARPQVQLQESGPGLVKPSETLSLTCTVSGVSLPDYGVSWIRQPPGKGLEWIGVIWGSETTYYSSSLKSRVTISKDNSKNQVSLKLSSVTAADTAVYYCAKHYYYGGSYAMDYWGQGTLVTVSSGGGGSGGGGSGGGGSGGGGSEIVMTQSPATLSLSPGERATLSCRASQDISKYLNWYQQKPGQAPRLLIYHTSRLHSGIPARFSGSGSGTDYTLTISSLQPEDFAVYFCQQGNTLPYTFGQGTKLEIKTTTPAPRPPTPAPTIASQPLSLRPEACRPAAGGAVHTRGLDFACDIYIWAPLAGTCGVLLLSLVITLYCKRGRKKLLYIFKQPFMRPVQTTQEEDGCSCRFPEEEEGGCELRVKFSRSADAPAYKQGQNQLYNELNLGRREEYDVLDKRRGRDPEMGGKPRRKNPQEGLYNELQKDKMAEAYSEIGMKGERRRGKGHDGLYQGLSTATKDTYDALHMQALPPR

SEQ ID NO: 928 - protein, 247 aa, Artificial Sequence; identical to SEQ ID NO: 364
  source: /note="Description of Artificial Sequence: Synthetic polypeptide"

SEQ ID NO: 929 - DNA, 828 bp, Artificial Sequence
  source: /note="Description of Artificial Sequence: Synthetic polynucleotide"
atggcactgcctgtcactgccctcctgctgcctctggccctccttctgcatgccgccaggccccaagtccagctgcaagagtcaggacccggactggtgaagccgtctgagactctctcactgacttgtaccgtcagcggcgtgtccctccccgactacggagtgtcatggatccgccaacctcccgggaaagggcttgaatggattggtgtcatctggggttctgaaaccacctactaccagtcttccctgaagtccagggtgaccatcagcaaggataattccaagaaccaggtcagccttaagctgtcatctgtgaccgctgctgacaccgccgtgtattactgcgccaagcactactattacggaggaagctacgctatggactattggggacagggcactctcgtgactgtgagcagcggcggtggagggtctggaggtggaggatccggtggtggtgggtcaggcggaggagggagcgagattgtgatgactcagtcaccagccaccctttctctttcacccggcgagagagcaaccctgagctgtagagccagccaggacatttctaagtacctcaactggtatcagcaaaaaccggggcaggcccctcgcctcctgatctaccatacctcacgccttcactctggtatccccgctcggtttagcggatcaggatctggtaccgactacactctgaccatttccagcctgcagccagaagatttcgcagtgtatttctgccagcagggcaatacccttccttacaccttcggtcagggaaccaagctcgaaatcaagcaccatcaccatcatcatcaccac

SEQ ID NO: 930 - protein, 276 aa, Artificial Sequence
  source: /note="Description of Artificial Sequence: Synthetic polypeptide"
MALPVTALLLPLALLLHAARPQVQLQESGPGLVKPSETLSLTCTVSGVSLPDYGVSWIRQPPGKGLEWIGVIWGSETTYYQSSLKSRVTISKDNSKNQVSLKLSSVTAADTAVYYCAKHYYYGGSYAMDYWGQGTLVTVSSGGGGSGGGGSGGGGSGGGGSEIVMTQSPATLSLSPGERATLSCRASQDISKYLNWYQQKPGQAPRLLIYHTSRLHSGIPARFSGSGSGTDYTLTISSLQPEDFAVYFCQQGNTLPYTFGQGTKLEIKHHHHHHHH

SEQ ID NO: 931 - DNA, 1473 bp, Artificial Sequence
  source: /note="Description of Artificial Sequence: Synthetic polynucleotide"
atggctctgcccgtgaccgcactcctcctgccactggctctgctgcttcacgccgctcgcccacaagtccagcttcaagaatcagggcctggtctggtgaagccatctgagactctgtccctcacttgcaccgtgagcggagtgtccctcccagactacggagtgagctggattagacagcctcccggaaagggactggagtggatcggagtgatttggggtagcgaaaccacttactatcaatcttccctgaagtcacgggtcaccatttcaaaggataactcaaagaatcaagtgagcctcaagctctcatcagtcaccgccgctgacaccgccgtgtattactgtgccaagcattactactatggagggtcctacgccatggactactggggccagggaactctggtcactgtgtcatctggtggaggaggtagcggaggaggcgggagcggtggaggtggctccggaggcggtgggtcagaaatcgtgatgacccagagccctgcaaccctgtccctttctcccggggaacgggctaccctttcttgtcgggcatcacaagatatctcaaaatacctcaattggtatcaacagaagccgggacaggcccctaggcttcttatctaccacacctctcgcctgcatagcgggattcccgcacgctttagcgggtctggaagcgggaccgactacactctgaccatctcatctctccagcccgaggacttcgccgtctacttctgccagcagggtaacaccctgccgtacaccttcggccagggcaccaagcttgagatcaaaaccactactcccgctccaaggccacccacccctgccccgaccatcgcctctcagccgctttccctgcgtccggaggcatgtagacccgcagctggtggggccgtgcatacccggggtcttgacttcgcctgcgatatctacatttgggcccctctggctggtacttgcggggtcctgctgctttcactcgtgatcactctttactgtaagcgcggtcggaagaagctgctgtacatctttaagcaacccttcatgaggcctgtgcagactactcaagaggaggacggctgttcatgccggttcccagaggaggaggaaggcggctgcgaactgcgcgtgaaattcagccgcagcgcagatgctccagcctacaagcaggggcagaaccagctctacaacgaactcaatcttggtcggagagaggagtacgacgtgctggacaagcggagaggacgggacccagaaatgggcgggaagccgcgcagaaagaatccccaagagggcctgtacaacgagctccaaaaggataagatggcagaagcctatagcgagattggtatgaaaggggaacgcagaagaggcaaaggccacgacggactgtaccagggactcagcaccgccaccaaggacacctatgacgctcttcacatgcaggccctgccgcctcgg

SEQ ID NO: 932 - protein, 491 aa, Artificial Sequence
  source: /note="Description of Artificial Sequence: Synthetic polypeptide"
MALPVTALLLPLALLLHAARPQVQLQESGPGLVKPSETLSLTCTVSGVSLPDYGVSWIRQPPGKGLEWIGVIWGSETTYYQSSLKSRVTISKDNSKNQVSLKLSSVTAADTAVYYCAKHYYYGGSYAMDYWGQGTLVTVSSGGGGSGGGGSGGGGSGGGGSEIVMTQSPATLSLSPGERATLSCRASQDISKYLNWYQQKPGQAPRLLIYHTSRLHSGIPARFSGSGSGTDYTLTISSLQPEDFAVYFCQQGNTLPYTFGQGTKLEIKTTTPAPRPPTPAPTIASQPLSLRPEACRPAAGGAVHTRGLDFACDIYIWAPLAGTCGVLLLSLVITLYCKRGRKKLLYIFKQPFMRPVQTTQEEDGCSCRFPEEEEGGCELRVKFSRSADAPAYKQGQNQLYNELNLGRREEYDVLDKRRGRDPEMGGKPRRKNPQEGLYNELQKDKMAEAYSEIGMKGERRRGKGHDGLYQGLSTATKDTYDALHMQALPPR

SEQ ID NO: 933 - protein, 247 aa, Artificial Sequence; identical to SEQ ID NO: 365
  source: /note="Description of Artificial Sequence: Synthetic polypeptide"

SEQ ID NO: 934 - DNA, 828 bp, Artificial Sequence
  source: /note="Description of Artificial Sequence: Synthetic polynucleotide"
atggccctcccagtgaccgctctgctgctgcctctcgcacttcttctccatgccgctcggcctgagatcgtcatgacccaaagccccgctaccctgtccctgtcacccggcgagagggcaaccctttcatgcagggccagccaggacatttctaagtacctcaactggtatcagcagaagccagggcaggctcctcgcctgctgatctaccacaccagccgcctccacagcggtatccccgccagattttccgggagcgggtctggaaccgactacaccctcaccatctcttctctgcagcccgaggatttcgccgtctatttctgccagcaggggaatactctgccgtacaccttcggtcaaggtaccaagctggaaatcaagggaggcggaggatcaggcggtggcggaagcggaggaggtggctccggaggaggaggttcccaagtgcagcttcaagaatcaggacccggacttgtgaagccatcagaaaccctctccctgacttgtaccgtgtccggtgtgagcctccccgactacggagtctcttggattcgccagcctccggggaagggtcttgaatggattggggtgatttggggatcagagactacttactacaattcatcacttaagtcacgggtcaccatcagcaaagataatagcaagaaccaagtgtcacttaagctgtcatctgtgaccgccgctgacaccgccgtgtactattgtgccaaacattactattacggagggtcttatgctatggactactggggacaggggaccctggtgactgtctctagccatcaccatcaccaccatcatcac

SEQ ID NO: 935 - protein, 276 aa, Artificial Sequence
  source: /note="Description of Artificial Sequence: Synthetic polypeptide"
MALPVTALLLPLALLLHAARPEIVMTQSPATLSLSPGERATLSCRASQDISKYLNWYQQKPGQAPRLLIYHTSRLHSGIPARFSGSGSGTDYTLTISSLQPEDFAVYFCQQGNTLPYTFGQGTKLEIKGGGGSGGGGSGGGGSGGGGSQVQLQESGPGLVKPSETLSLTCTVSGVSLPDYGVSWIRQPPGKGLEWIGVIWGSETTYYNSSLKSRVTISKDNSKNQVSLKLSSVTAADTAVYYCAKHYYYGGSYAMDYWGQGTLVTVSSHHHHHHHH

SEQ ID NO: 936 - DNA, 1473 bp, Artificial Sequence
  source: /note="Description of Artificial Sequence: Synthetic polynucleotide"
atggccctccctgtcaccgccctgctgcttccgctggctcttctgctccacgccgctcggcccgaaattgtgatgacccagtcacccgccactcttagcctttcacccggtgagcgcgcaaccctgtcttgcagagcctcccaagacatctcaaaataccttaattggtatcaacagaagcccggacaggctcctcgccttctgatctaccacaccagccggctccattctggaatccctgccaggttcagcggtagcggatctgggaccgactacaccctcactatcagctcactgcagccagaggacttcgctgtctatttctgtcagcaagggaacaccctgccctacacctttggacagggcaccaagctcgagattaaaggtggaggtggcagcggaggaggtgggtccggcggtggaggaagcggaggcggtgggagccaggtccaactccaagaaagcggaccgggtcttgtgaagccatcagaaactctttcactgacttgtactgtgagcggagtgtctctccccgattacggggtgtcttggatcagacagccaccggggaagggtctggaatggattggagtgatttggggctctgagactacttactacaactcatccctcaagtcacgcgtcaccatctcaaaggacaactctaagaatcaggtgtcactgaaactgtcatctgtgaccgcagccgacaccgccgtgtactattgcgctaagcattactattatggcgggagctacgcaatggattactggggacagggtactctggtcaccgtgtccagcaccactaccccagcaccgaggccacccaccccggctcctaccatcgcctcccagcctctgtccctgcgtccggaggcatgtagacccgcagctggtggggccgtgcatacccggggtcttgacttcgcctgcgatatctacatttgggcccctctggctggtacttgcggggtcctgctgctttcactcgtgatcactctttactgtaagcgcggtcggaagaagctgctgtacatctttaagcaacccttcatgaggcctgtgcagactactcaagaggaggacggctgttcatgccggttcccagaggaggaggaaggcggctgcgaactgcgcgtgaaattcagccgcagcgcagatgctccagcctacaagcaggggcagaaccagctctacaacgaactcaatcttggtcggagagaggagtacgacgtgctggacaagcggagaggacgggacccagaaatgggcgggaagccgcgcagaaagaatccccaagagggcctgtacaacgagctccaaaaggataagatggcagaagcctatagcgagattggtatgaaaggggaacgcagaagaggcaaaggccacgacggactgtaccagggactcagcaccgccaccaaggacacctatgacgctcttcacatgcaggccctgccgcctcgg

SEQ ID NO: 937 - protein, 491 aa, Artificial Sequence
  source: /note="Description of Artificial Sequence: Synthetic polypeptide"
MALPVTALLLPLALLLHAARPEIVMTQSPATLSLSPGERATLSCRASQDISKYLNWYQQKPGQAPRLLIYHTSRLHSGIPARFSGSGSGTDYTLTISSLQPEDFAVYFCQQGNTLPYTFGQGTKLEIKGGGGSGGGGSGGGGSGGGGSQVQLQESGPGLVKPSETLSLTCTVSGVSLPDYGVSWIRQPPGKGLEWIGVIWGSETTYYNSSLKSRVTISKDNSKNQVSLKLSSVTAADTAVYYCAKHYYYGGSYAMDYWGQGTLVTVSSTTTPAPRPPTPAPTIASQPLSLRPEACRPAAGGAVHTRGLDFACDIYIWAPLAGTCGVLLLSLVITLYCKRGRKKLLYIFKQPFMRPVQTTQEEDGCSCRFPEEEEGGCELRVKFSRSADAPAYKQGQNQLYNELNLGRREEYDVLDKRRGRDPEMGGKPRRKNPQEGLYNELQKDKMAEAYSEIGMKGERRRGKGHDGLYQGLSTATKDTYDALHMQALPPR

SEQ ID NO: 938 - protein, 247 aa, Artificial Sequence; identical to SEQ ID NO: 366
  source: /note="Description of Artificial Sequence: Synthetic polypeptide"

SEQ ID NO: 939 - DNA, 828 bp, Artificial Sequence
  source: /note="Description of Artificial Sequence: Synthetic polynucleotide"
atggcactgcctgtcactgccctcctgctgcctctggccctccttctgcatgccgccaggccccaagtccagctgcaagagtcaggacccggactggtgaagccgtctgagactctctcactgacttgtaccgtcagcggcgtgtccctccccgactacggagtgtcatggatccgccaacctcccgggaaagggcttgaatggattggtgtcatctggggttctgaaaccacctactacaactcttccctgaagtccagggtgaccatcagcaaggataattccaagaaccaggtcagccttaagctgtcatctgtgaccgctgctgacaccgccgtgtattactgcgccaagcactactattacggaggaagctacgctatggactattggggacagggcactctcgtgactgtgagcagcggcggtggagggtctggaggtggaggatccggtggtggtgggtcaggcggaggagggagcgagattgtgatgactcagtcaccagccaccctttctctttcacccggcgagagagcaaccctgagctgtagagccagccaggacatttctaagtacctcaactggtatcagcaaaaaccggggcaggcccctcgcctcctgatctaccatacctcacgccttcactctggtatccccgctcggtttagcggatcaggatctggtaccgactacactctgaccatttccagcctgcagccagaagatttcgcagtgtatttctgccagcagggcaatacccttccttacaccttcggtcagggaaccaagctcgaaatcaagcaccatcaccatcatcaccaccat

SEQ ID NO: 940 - protein, 276 aa, Artificial Sequence
  source: /note="Description of Artificial Sequence: Synthetic polypeptide"
MALPVTALLLPLALLLHAARPQVQLQESGPGLVKPSETLSLTCTVSGVSLPDYGVSWIRQPPGKGLEWIGVIWGSETTYYNSSLKSRVTISKDNSKNQVSLKLSSVTAADTAVYYCAKHYYYGGSYAMDYWGQGTLVTVSSGGGGSGGGGSGGGGSGGGGSEIVMTQSPATLSLSPGERATLSCRASQDISKYLNWYQQKPGQAPRLLIYHTSRLHSGIPARFSGSGSGTDYTLTISSLQPEDFAVYFCQQGNTLPYTFGQGTKLEIKHHHHHHHH

SEQ ID NO: 941 - DNA, 1473 bp, Artificial Sequence; identical to SEQ ID NO: 936
  source: /note="Description of Artificial Sequence: Synthetic polynucleotide"

SEQ ID NO: 942 - protein, 491 aa, Artificial Sequence; identical to SEQ ID NO: 937
  source: /note="Description of Artificial Sequence: Synthetic polypeptide"

SEQ ID NO: 943 - protein, 242 aa, Artificial Sequence; identical to SEQ ID NO: 367
  source: /note="Description of Artificial Sequence: Synthetic polypeptide"

SEQ ID NO: 944 - DNA, 813 bp, Artificial Sequence
  source: /note="Description of Artificial Sequence: Synthetic polynucleotide"
atggccctccctgtcaccgccctgctgcttccgctggctcttctgctccacgccgctcggcccgaaattgtgatgacccagtcacccgccactcttagcctttcacccggtgagcgcgcaaccctgtcttgcagagcctcccaagacatctcaaaataccttaattggtatcaacagaagcccggacaggctcctcgccttctgatctaccacaccagccggctccattctggaatccctgccaggttcagcggtagcggatctgggaccgactacaccctcactatcagctcactgcagccagaggacttcgctgtctatttctgtcagcaagggaacaccctgccctacacctttggacagggcaccaagctcgagattaaaggtggaggtggcagcggaggaggtgggtccggcggtggaggaagccaggtccaactccaagaaagcggaccgggtcttgtgaagccatcagaaactctttcactgacttgtactgtgagcggagtgtctctccccgattacggggtgtcttggatcagacagccaccggggaagggtctggaatggattggagtgatttggggctctgagactacttactacaattcatccctcaagtcacgcgtcaccatctcaaaggacaactctaagaatcaggtgtcactgaaactgtcatctgtgaccgcagccgacaccgccgtgtactattgcgctaagcattactattatggcgggagctacgcaatggattactggggacagggtactctggtcaccgtgtccagccaccaccatcatcaccatcaccat

SEQ ID NO: 945 - protein, 271 aa, Artificial Sequence
  source: /note="Description of Artificial Sequence: Synthetic polypeptide"
MALPVTALLLPLALLLHAARPEIVMTQSPATLSLSPGERATLSCRASQDISKYLNWYQQKPGQAPRLLIYHTSRLHSGIPARFSGSGSGTDYTLTISSLQPEDFAVYFCQQGNTLPYTFGQGTKLEIKGGGGSGGGGSGGGGSQVQLQESGPGLVKPSETLSLTCTVSGVSLPDYGVSWIRQPPGKGLEWIGVIWGSETTYYNSSLKSRVTISKDNSKNQVSLKLSSVTAADTAVYYCAKHYYYGGSYAMDYWGQGTLVTVSSHHHHHHHH

SEQ ID NO: 946 - DNA, 1473 bp, Artificial Sequence
  source: /note="Description of Artificial Sequence: Synthetic polynucleotide"
atggctctgcccgtgaccgcactcctcctgccactggctctgctgcttcacgccgctcgcccacaagtccagcttcaagaatcagggcctggtctggtgaagccatctgagactctgtccctcacttgcaccgtgagcggagtgtccctcccagactacggagtgagctggattagacagcctcccggaaagggactggagtggatcggagtgatttggggtagcgaaaccacttactataactcttccctgaagtcacgggtcaccatttcaaaggataactcaaagaatcaagtgagcctcaagctctcatcagtcaccgccgctgacaccgccgtgtattactgtgccaagcattactactatggagggtcctacgccatggactactggggccagggaactctggtcactgtgtcatctggtggaggaggtagcggaggaggcgggagcggtggaggtggctccggaggtggcggaagcgaaatcgtgatgacccagagccctgcaaccctgtccctttctcccggggaacgggctaccctttcttgtcgggcatcacaagatatctcaaaatacctcaattggtatcaacagaagccgggacaggcccctaggcttcttatctaccacacctctcgcctgcatagcgggattcccgcacgctttagcgggtctggaagcgggaccgactacactctgaccatctcatctctccagcccgaggacttcgccgtctacttctgccagcagggtaacaccctgccgtacaccttcggccagggcaccaagcttgagatcaaaaccactactcccgctccaaggccacccacccctgccccgaccatcgcctctcagccgctttccctgcgtccggaggcatgtagacccgcagctggtggggccgtgcatacccggggtcttgacttcgcctgcgatatctacatttgggcccctctggctggtacttgcggggtcctgctgctttcactcgtgatcactctttactgtaagcgcggtcggaagaagctgctgtacatctttaagcaacccttcatgaggcctgtgcagactactcaagaggaggacggctgttcatgccggttcccagaggaggaggaaggcggctgcgaactgcgcgtgaaattcagccgcagcgcagatgctccagcctacaagcaggggcagaaccagctctacaacgaactcaatcttggtcggagagaggagtacgacgtgctggacaagcggagaggacgggacccagaaatgggcgggaagccgcgcagaaagaatccccaagagggcctgtacaacgagctccaaaaggataagatggcagaagcctatagcgagattggtatgaaaggggaacgcagaagaggcaaaggccacgacggactgtaccagggactcagcaccgccaccaaggacacctatgacgctcttcacatgcaggccctgccgcctcgg

SEQ ID NO: 947 - protein, 491 aa, Artificial Sequence
  source: /note="Description of Artificial Sequence: Synthetic polypeptide"
MALPVTALLLPLALLLHAARPQVQLQESGPGLVKPSETLSLTCTVSGVSLPDYGVSWIRQPPGKGLEWIGVIWGSETTYYNSSLKSRVTISKDNSKNQVSLKLSSVTAADTAVYYCAKHYYYGGSYAMDYWGQGTLVTVSSGGGGSGGGGSGGGGSGGGGSEIVMTQSPATLSLSPGERATLSCRASQDISKYLNWYQQKPGQAPRLLIYHTSRLHSGIPARFSGSGSGTDYTLTISSLQPEDFAVYFCQQGNTLPYTFGQGTKLEIKTTTPAPRPPTPAPTIASQPLSLRPEACRPAAGGAVHTRGLDFACDIYIWAPLAGTCGVLLLSLVITLYCKRGRKKLLYIFKQPFMRPVQTTQEEDGCSCRFPEEEEGGCELRVKFSRSADAPAYKQGQNQLYNELNLGRREEYDVLDKRRGRDPEMGGKPRRKNPQEGLYNELQKDKMAEAYSEIGMKGERRRGKGHDGLYQGLSTATKDTYDALHMQALPPR

SEQ ID NO: 948 - protein, 242 aa, Artificial Sequence; identical to SEQ ID NO: 368
  source: /note="Description of Artificial Sequence: Synthetic polypeptide"

SEQ ID NO: 949 - DNA, 813 bp, Artificial Sequence
  source: /note="Description of Artificial Sequence: Synthetic polynucleotide"
atggctctgcccgtgaccgcactcctcctgccactggctctgctgcttcacgccgctcgcccacaagtccagcttcaagaatcagggcctggtctggtgaagccatctgagactctgtccctcacttgcaccgtgagcggagtgtccctcccagactacggagtgagctggattagacagcctcccggaaagggactggagtggatcggagtgatttggggtagcgaaaccacttactataactcttccctgaagtcacgggtcaccatttcaaaggataactcaaagaatcaagtgagcctcaagctctcatcagtcaccgccgctgacaccgccgtgtattactgtgccaagcattactactatggagggtcctacgccatggactactggggccagggaactctggtcactgtgtcatctggtggaggaggtagcggaggaggcgggagcggtggaggtggctccgaaatcgtgatgacccagagccctgcaaccctgtccctttctcccggggaacgggctaccctttcttgtcgggcatcacaagatatctcaaaatacctcaattggtatcaacagaagccgggacaggcccctaggcttcttatctaccacacctctcgcctgcatagcgggattcccgcacgctttagcgggtctggaagcgggaccgactacactctgaccatctcatctctccagcccgaggacttcgccgtctacttctgccagcagggtaacaccctgccgtacaccttcggccagggcaccaagcttgagatcaaacatcaccaccatcatcaccatcac

SEQ ID NO: 950 - protein, 271 aa, Artificial Sequence
  source: /note="Description of Artificial Sequence: Synthetic polypeptide"
MALPVTALLLPLALLLHAARPQVQLQESGPGLVKPSETLSLTCTVSGVSLPDYGVSWIRQPPGKGLEWIGVIWGSETTYYNSSLKSRVTISKDNSKNQVSLKLSSVTAADTAVYYCAKHYYYGGSYAMDYWGQGTLVTVSSGGGGSGGGGSGGGGSEIVMTQSPATLSLSPGERATLSCRASQDISKYLNWYQQKPGQAPRLLIYHTSRLHSGIPARFSGSGSGTDYTLTISSLQPEDFAVYFCQQGNTLPYTFGQGTKLEIKHHHHHHHH

SEQ ID NO: 951 - DNA, 1458 bp, Artificial Sequence
  source: /note="Description of Artificial Sequence: Synthetic polynucleotide"
atggccctccctgtcaccgccctgctgcttccgctggctcttctgctccacgccgctcggcccgaaattgtgatgacccagtcacccgccactcttagcctttcacccggtgagcgcgcaaccctgtcttgcagagcctcccaagacatctcaaaataccttaattggtatcaacagaagcccggacaggctcctcgccttctgatctaccacaccagccggctccattctggaatccctgccaggttcagcggtagcggatctgggaccgactacaccctcactatcagctcactgcagccagaggacttcgctgtctatttctgtcagcaagggaacaccctgccctacacctttggacagggcaccaagctcgagattaaaggtggaggtggcagcggaggaggtgggtccggcggtggaggaagccaggtccaactccaagaaagcggaccgggtcttgtgaagccatcagaaactctttcactgacttgtactgtgagcggagtgtctctccccgattacggggtgtcttggatcagacagccaccggggaagggtctggaatggattggagtgatttggggctctgagactacttactacaactcatccctcaagtcacgcgtcaccatctcaaaggacaactctaagaatcaggtgtcactgaaactgtcatctgtgaccgcagccgacaccgccgtgtactattgcgctaagcattactattatggcgggagctacgcaatggattactggggacagggtactctggtcaccgtgtccagcaccactaccccagcaccgaggccacccaccccggctcctaccatcgcctcccagcctctgtccctgcgtccggaggcatgtagacccgcagctggtggggccgtgcatacccggggtcttgacttcgcctgcgatatctacatttgggcccctctggctggtacttgcggggtcctgctgctttcactcgtgatcactctttactgtaagcgcggtcggaagaagctgctgtacatctttaagcaacccttcatgaggcctgtgcagactactcaagaggaggacggctgttcatgccggttcccagaggaggaggaaggcggctgcgaactgcgcgtgaaattcagccgcagcgcagatgctccagcctacaagcaggggcagaaccagctctacaacgaactcaatcttggtcggagagaggagtacgacgtgctggacaagcggagaggacgggacccagaaatgggcgggaagccgcgcagaaagaatccccaagagggcctgtacaacgagctccaaaaggataagatggcagaagcctatagcgagattggtatgaaaggggaacgcagaagaggcaaaggccacgacggactgtaccagggactcagcaccgccaccaaggacacctatgacgctcttcacatgcaggccctgccgcctcgg

SEQ ID NO: 952 - protein, 486 aa, Artificial Sequence
  source: /note="Description of Artificial Sequence: Synthetic polypeptide"
MALPVTALLLPLALLLHAARPEIVMTQSPATLSLSPGERATLSCRASQDISKYLNWYQQKPGQAPRLLIYHTSRLHSGIPARFSGSGSGTDYTLTISSLQPEDFAVYFCQQGNTLPYTFGQGTKLEIKGGGGSGGGGSGGGGSQVQLQESGPGLVKPSETLSLTCTVSGVSLPDYGVSWIRQPPGKGLEWIGVIWGSETTYYNSSLKSRVTISKDNSKNQVSLKLSSVTAADTAVYYCAKHYYYGGSYAMDYWGQGTLVTVSSTTTPAPRPPTPAPTIASQPLSLRPEACRPAAGGAVHTRGLDFACDIYIWAPLAGTCGVLLLSLVITLYCKRGRKKLLYIFKQPFMRPVQTTQEEDGCSCRFPEEEEGGCELRVKFSRSADAPAYKQGQNQLYNELNLGRREEYDVLDKRRGRDPEMGGKPRRKNPQEGLYNELQKDKMAEAYSEIGMKGERRRGKGHDGLYQGLSTATKDTYDALHMQALPPR

SEQ ID NO: 953 - DNA, 813 bp, Artificial Sequence
  source: /note="Description of Artificial Sequence: Synthetic polynucleotide"
atggccctgcccgtcaccgctctgctgctgccccttgctctgcttcttcatgcagcaaggccggacatccagatgacccaaaccacctcatccctctctgcctctcttggagacagggtgaccatttcttgtcgcgccagccaggacatcagcaagtatctgaactggtatcagcagaagccggacggaaccgtgaagctcctgatctaccatacctctcgcctgcatagcggcgtgccctcacgcttctctggaagcggatcaggaaccgattattctctcactatttcaaatcttgagcaggaagatattgccacctatttctgccagcagggtaataccctgccctacaccttcggaggagggaccaagctcgaaatcaccggtggaggaggcagcggcggtggagggtctggtggaggtggttctgaggtgaagctgcaagaatcaggccctggacttgtggccccttcacagtccctgagcgtgacttgcaccgtgtccggagtctccctgcccgactacggagtgtcatggatcagacaacctccacggaaaggactggaatggctcggtgtcatctggggtagcgaaactacttactacaattcagccctcaaaagcaggctgactattatcaaggacaacagcaagtcccaagtctttcttaagatgaactcactccagactgacgacaccgcaatctactattgtgctaagcactactactacggaggatcctacgctatggattactggggacaaggtacttccgtcactgtctcttcacaccatcatcaccatcaccatcac

SEQ ID NO: 954 - protein, 271 aa, Artificial Sequence
  source: /note="Description of Artificial Sequence: Synthetic polypeptide"
MALPVTALLLPLALLLHAARPDIQMTQTTSSLSASLGDRVTISCRASQDISKYLNWYQQKPDGTVKLLIYHTSRLHSGVPSRFSGSGSGTDYSLTISNLEQEDIATYFCQQGNTLPYTFGGGTKLEITGGGGSGGGGSGGGGSEVKLQESGPGLVAPSQSLSVTCTVSGVSLPDYGVSWIRQPPRKGLEWLGVIWGSETTYYNSALKSRLTIIKDNSKSQVFLKMNSLQTDDTAIYYCAKHYYYGGSYAMDYWGQGTSVTVSSHHHHHHHH

SEQ ID NO: 955 - DNA, 1458 bp, Artificial Sequence
  source: /note="Description of Artificial Sequence: Synthetic polynucleotide"
atggccttaccagtgaccgccttgctcctgccgctggccttgctgctccacgccgccaggccggacatccagatgacacagactacatcctccctgtctgcctctctgggagacagagtcaccatcagttgcagggcaagtcaggacattagtaaatatttaaattggtatcagcagaaaccagatggaactgttaaactcctgatctaccatacatcaagattacactcaggagtcccatcaaggttcagtggcagtgggtctggaacagattattctctcaccattagcaacctggagcaagaagatattgccacttacttttgccaacagggtaatacgcttccgtacacgttcggaggggggaccaagctggagatcacaggtggcggtggctcgggcggtggtgggtcgggtggcggcggatctgaggtgaaactgcaggagtcaggacctggcctggtggcgccctcacagagcctgtccgtcacatgcactgtctcaggggtctcattacccgactatggtgtaagctggattcgccagcctccacgaaagggtctggagtggctgggagtaatatggggtagtgaaaccacatactataattcagctctcaaatccagactgaccatcatcaaggacaactccaagagccaagttttcttaaaaatgaacagtctgcaaactgatgacacagccatttactactgtgccaaacattattactacggtggtagctatgctatggactactggggccaaggaacctcagtcaccgtctcctcaaccacgacgccagcgccgcgaccaccaacaccggcgcccaccatcgcgtcgcagcccctgtccctgcgcccagaggcgtgccggccagcggcggggggcgcagtgcacacgagggggctggacttcgcctgtgatatctacatctgggcgcccttggccgggacttgtggggtccttctcctgtcactggttatcaccctttactgcaaacggggcagaaagaaactcctgtatatattcaaacaaccatttatgagaccagtacaaactactcaagaggaagatggctgtagctgccgatttccagaagaagaagaaggaggatgtgaactgagagtgaagttcagcaggagcgcagacgcccccgcgtacaagcagggccagaaccagctctataacgagctcaatctaggacgaagagaggagtacgatgttttggacaagagacgtggccgggaccctgagatggggggaaagccgagaaggaagaaccctcaggaaggcctgtacaatgaactgcagaaagataagatggcggaggcctacagtgagattgggatgaaaggcgagcgccggaggggcaaggggcacgatggcctttaccagggtctcagtacagccaccaaggacacctacgacgcccttcacatgcaggccctgccccctcgc

SEQ ID NO: 956 - protein, 486 aa, Artificial Sequence; identical to SEQ ID NO: 891
  source: /note="Description of Artificial Sequence: Synthetic polypeptide"

SEQ ID NO: 957 - protein, 242 aa, Artificial Sequence; identical to SEQ ID NO: 356
  source: /note="Description of Artificial Sequence: Synthetic polypeptide"

SEQ ID NO: 958 - protein, 5 aa, Artificial Sequence
  source: /note="Description of Artificial Sequence: Synthetic peptide"
DYGVS

SEQ ID NO: 959 - protein, 16 aa, Artificial Sequence
  source: /note="Description of Artificial Sequence: Synthetic peptide"
VIWGSETTYYNSALKS

SEQ ID NO: 960 - protein, 12 aa, Artificial Sequence
  source: /note="Description of Artificial Sequence: Synthetic peptide"
HYYYGGSYAMDY

SEQ ID NO: 961 - protein, 16 aa, Artificial Sequence
  source: /note="Description of Artificial Sequence: Synthetic peptide"
VIWGSETTYYSSSLKS

SEQ ID NO: 962 - protein, 16 aa, Artificial Sequence
  source: /note="Description of Artificial Sequence: Synthetic peptide"
VIWGSETTYYQSSLKS

SEQ ID NO: 963 - protein, 16 aa, Artificial Sequence
  source: /note="Description of Artificial Sequence: Synthetic peptide"
VIWGSETTYYNSSLKS

SEQ ID NO: 964 - protein, 11 aa, Artificial Sequence
  source: /note="Description of Artificial Sequence: Synthetic peptide"
RASQDISKYLN

SEQ ID NO: 965 - protein, 7 aa, Artificial Sequence
  source: /note="Description of Artificial Sequence: Synthetic peptide"
HTSRLHS

SEQ ID NO: 966 - protein, 9 aa, Artificial Sequence
  source: /note="Description of Artificial Sequence: Synthetic peptide"
QQGNTLPYT

SEQ ID NO: 967 - protein, 30 aa, Artificial Sequence
  source: /note="Description of Artificial Sequence: Synthetic polypeptide"
  MISC_FEATURE (1)..(30): /note="This sequence may encompass 1-6 'Gly Gly Gly Gly Ser' repeating units"
GGGGSGGGGSGGGGSGGGGSGGGGSGGGGS

SEQ ID NO: 968 - DNA, 100 bp, Artificial Sequence
  source: /note="Description of Artificial Sequence: Synthetic polynucleotide"
tttttttttttttttttttttttttttttttttttttttttttttttttttttttttttttttttttttttttttttttttttttttttttttttttttt

SEQ ID NO: 969 - DNA, 400 bp, Artificial Sequence
  source: /note="Description of Artificial Sequence: Synthetic polynucleotide"
  misc_feature (1)..(400): /note="This sequence may encompass 100-400 nucleotides"
  source: /note="See specification as filed for detailed description of substitutions and preferred embodiments"
aaaaaaaaaaaaaaaaaaaaaaaaaaaaaaaaaaaaaaaaaaaaaaaaaaaaaaaaaaaaaaaaaaaaaaaaaaaaaaaaaaaaaaaaaaaaaaaaaaaaaaaaaaaaaaaaaaaaaaaaaaaaaaaaaaaaaaaaaaaaaaaaaaaaaaaaaaaaaaaaaaaaaaaaaaaaaaaaaaaaaaaaaaaaaaaaaaaaaaaaaaaaaaaaaaaaaaaaaaaaaaaaaaaaaaaaaaaaaaaaaaaaaaaaaaaaaaaaaaaaaaaaaaaaaaaaaaaaaaaaaaaaaaaaaaaaaaaaaaaaaaaaaaaaaaaaaaaaaaaaaaaaaaaaaaaaaaaaaaaaaaaaaaaaaaaaaaaaaaaaaaaaaaaaaaaaaaaaaaaaaaaaaaaaaaaaaaaaaaaa

SEQ ID NO: 970 - protein, 245 aa, Artificial Sequence
  source: /note="Description of Artificial Sequence: Synthetic polypeptide"
SLALSLTADQMVSALLDAEPPILYSEYDPTRPFSEASMMGLLTNLADRELVHMINWAKRVPGFVDLTLHDQVHLLECAWLEILMIGLVWRSMEHPGKLLFAPNLLLDRNQGKCVEGMVEIFDMLLATSSRFRMMNLQGEEFVCLKSIILLNSGVYTFLSSTLKSLEEKDHIHRVLDKITDTLIHLMAKAGLTLQQQHQRLAQLLLILSHIRHMSNKGMEHLYSMKCKNVVPLYDLLLEMLDAHRL

SEQ ID NO: 971 - DNA, 735 bp, Artificial Sequence
  source: /note="Description of Artificial Sequence: Synthetic polynucleotide"
tcgttggcactttccctgactgccgaccagatggtgtccgcccttctggacgccgagcctccaattctgtactcggagtacgatccgactcgcccgttctccgaagccagcatgatgggcctgttgactaacctggcggaccgcgagttggtgcacatgattaactgggctaagcgggtgccgggcttcgtggacctgactctgcacgaccaagtgcacctcctggaatgcgcctggctggaaatcctcatgatcggcctcgtgtggagatccatggagcatcccggaaagctcctgtttgcacccaacctcctgcttgatcgcaaccagggaaaatgcgtggaagggatggtcgagattttcgacatgctgctcgccacctcttcccggttccggatgatgaatctgcagggagaagagttcgtgtgtctgaagtcaatcatcctgctgaactccggggtctataccttcctgagctcgaccctcaagtcactggaggaaaaagaccacatccatcgcgtgctcgataagatcaccgacacccttatccatctcatggcgaaggctggactgaccctgcaacagcagcaccagaggctggcccagttgctgctgattctgagccacatccggcacatgtcgaacaaggggatggaacacctgtacagcatgaagtgcaagaacgtcgtgcctctgtacgatctgctcctggaaatgctggacgcgcacagactc

SEQ ID NO: 972 - protein, 69 aa, Artificial Sequence
  source: /note="Description of Artificial Sequence: Synthetic polypeptide"
TTTPAPRPPTPAPTIASQPLSLRPEACRPAAGGAVHTRGLDFACDFWLPIGCAAFVVVCILGCILICWL

SEQ ID NO: 973 - DNA, 207 bp, Artificial Sequence
  source: /note="Description of Artificial Sequence: Synthetic polynucleotide"
accacgacgccagcgccgcgaccaccaacaccggcgcccaccatcgcgtcgcagcccctgtccctgcgcccagaggcgtgccggccagcggcggggggcgcagtgcacacgagggggctggacttcgcctgtgatttctggttacccataggatgtgcagcctttgttgtagtctgcattttgggatgcatacttatttgttggctt

SEQ ID NO: 974 - DNA, 5000 bp, Artificial Sequence
  source: /note="Description of Artificial Sequence: Synthetic polynucleotide"
  misc_feature (1)..(5000): /note="This sequence may encompass 50-5000 nucleotides"
  source: /note="See specification as filed for detailed description of substitutions and preferred embodiments"
tttttttttttttttttttttttttttttttttttttttttttttttttttttttttttttttttttttttttttttttttttttttttttttttttttttttttttttttttttttttttttttttttttttttttttttttttttttttttttttttttttttttttttttttttttttttttttttttttttttttttttttttttttttttttttttttttttttttttttttttttttttttttttttttttttttttttttttttttttttttttttttttttttttttttttttttttttttttttttttttttttttttttttttttttttttttttttttttttttttttttttttttttttttttttttttttttttttttttttttttttttttttttttttttttttttttttttttttttttttttttttttttttttttttttttttttttttttttttttttttttttttttttttttttttttttttttttttttttttttttttttttttttttttttttttttttttttttttttttttttttttttttttttttttttttttttttttttttttttttttttttttttttttttttttttttttttttttttttttttttttttttttttttttttttttttttttttttttttttttttttttttttttttttttttttttttttttttttttttttttttttttttttttttttttttttttttttttttttttttttttttttttttttttttttttttttttttttttttttttttttttttttttttttttttttttttttttttttttttttttttttttttttttttttttttttttttttttttttttttttttttttttttttttttttttttttttttttttttttttttttttttttttttttttttttttttttttttttttttttttttttttttttttttttttttttttttttttttttttttttttttttttttttttttttttttttttttttttttttttttttttttttttttttttttttttttttttttttttttttttttttttttttttttttttttttttttttttttttttttttttttttttttttttttttttttttttttttttttttttttttttttttttttttttttttttttttttttttttttttttttttttttttttttttttttttttttttttttttttttttttttttttttttttttttttttttttttttttttttttttttttttttttttttttttttttttttttttttttttttttttttttttttttttttttttttttttttttttttttttttttttttttttttttttttttttttttttttttttttttttttttttttttttttttttttttttttttttttttttttttttttttttttttttttttttttttttttttttttttttttttttttttttttttttttttttttttttttttttttttttttttttttttttttttttttttttttttttttttttttttttttttttttttttttttttttttttttttttttttttttttttttttttttttttttttttttttttttttttttttttttttttttttttttttttttttttttttttttttttttttttttttttttttttttttttttttttttttttttttttttttttttttttttttttttttttttttttttttttttttttttttttttttttttttttttttttttttttttttttttttttttttttttttttttttttttttttttttttttttttttttttttttttttttttttttttttttttttttttttttttttttttttttttttttttttttttttttttttttttttttttttttttttttttttttttttttttttttttttttttttttttttttttttttttttttttttttttttttttttttttttttttttttttttttttttttttttttttttttttttttttttttttttttttttttttttttttttttttttttttttttttttttttttttttttttttttttttttttttttttttttttttttttttttttttttttttttttttttttttttttttttttttttttttttttttttttttttttttttttttttttttttttttttttttttttttttttttttttttttttttttttttttttttttttttttttttttttttttttttttttttttttttttttttttttttttttttttttttttttttttttttttttttttttttttttttttttttttttttttttttttttttttttttttttttttttttttttttttttttttttttttttttttttttttttttttttttttttttttttttttttttttttttttttttttttttttttttttttttttttttttttttttttttttttttttttttttttttttttttttttttttttttttttttttttttttttttttttttttttttttttttttttttttttttttttttttttttttttttttttttttttttttttttttttttttttttttttttttttttttttttttttttttttttttttttttttttttttttttttttttttttttttttttttttttttttttttttttttttttttttttttttttttttttttttttttttttttttttttttttttttttttttttttttttttttttttttttttttttttttttttttttttttttttttttttttttttttttttttttttttttttttttttttttttttttttttttttttttttttttttttttttttttttttttttttttttttttttttttttttttttttttttttttttttttttttttttttttttttttttttttttttttttttttttttttttttttttttttttttttttttttttttttttttttttttttttttttttttttttttttttttttttttttttttttttttttttttttttttttttttttttttttttttttttttttttttttttttttttttttttttttttttttttttttttttttttttttttttttttttttttttttttttttttttttttttttttttttttttttttttttttttttttttttttttttttttttttttttttttttttttttttttttttttttttttttttttttttttttttttttttttttttttttttttttttttttttttttttttttttttttttttttttttttttttttttttttttttttttttttttttttttttttttttttttttttttttttttttttttttttttttttttttttttttttttttttttttttttttttttttttttttttttttttttttttttttttttttttttttttttttttttttttttttttttttttttttttttttttttttttttttttttttttttttttttttttttttttttttttttttttttttttttttttttttttttttttttttttttttttttttttttttttttttttttttttttttttttttttttttttttttttttttttttttttttttttttttttttttttttttttttttttttttttttttttttttttttttttttttttttttttttttttttttttttttttttttttttttttttttttttttttttttttttttttttttttttttttttttttttttttttttttttttttttttttttttttttttttttttttttttttttttttttttttttttttttttttttttttttttttttttttttttttttttttttttttttttttttttttttttttttttttttttttttttttttttttttttttttttttttttttttttttttttttttttttttttttttttttttttttttttttttttttttttttttttttttttttttttttttttttttttttttttttttttttttttttttttttttttttttttttttttttttttttttttttttttttttttttttttttttttttttttttttttttttttttttttttttttttttttttttttttttttttttttttttttttttttttttttttttttttttttttttttttttttttttttttttttttttttttttttttttttttttttttttttttttttttttttttttttttttttttttttttttttttttttttttttttttttttttttttttttttttttttttttttttttttttttttttttttttttttttttttttttttttttttttttttttttttttttttttttttttttttttttttttttttttttttttttttttttttttttttttttttttttttttttttttttttttttttttttttttttttttttttttttttttttttttttttttttttttttttttttttttttttttttttttttttttttttttttttttttttttttttttttttttttttttttttttttttttttttttttttttttttttttttttttttttttttttttttttttttttttttttttttttttttttttttttttttttttttttttttttttttttttttttttttttttttttttttttttttttttttttttttttttttttttttttttttttttttttttttttttttttttttttttttttttttttttttttttttttttttttttttttttttttttttttttttttttttttttttttttttttttttttttttttttttttttttttttttttttttttttttttttttttttttttttttttttttttttttttttttttttttttttttttttttttttttttttttttttttttttttttttttttttttttttttttttttttttt

SEQ ID NO: 975 - protein, 107 aa, Artificial Sequence
  source: /note="Description of Artificial Sequence: Synthetic polypeptide"
GVQVETISPGDGRTFPKRGQTCVVHYTGMLEDGKKFDSSRDRNKPFKFMLGKQEVIRGWEEGVAQMSVGQRAKLTISPDYAYGATGHPGIIPPHATLVFDVELLKLE

SEQ ID NO: 976 - protein, 107 aa, Artificial Sequence
  source: /note="Description of Artificial Sequence: Synthetic polypeptide"
GVQVETISPGDGRTFPKRGQTCVVHYTGMLEDGKKMDSSRDRNKPFKFMLGKQEVIRGWEEGVAQMSVGQRAKLTISPDYAYGATGHPGIIPPHATLVFDVELLKLE

SEQ ID NO: 977 - DNA, 2817 bp, Artificial Sequence
  source: /note="Description of Artificial Sequence: Synthetic polynucleotide"
atggccttaccagtgaccgccttgctcctgccgctggccttgctgctccacgccgccaggccgggatcccggggcgtgcaggttgagacaatttccccaggagatgggcgaacgttccccaagcgcggacagacatgcgttgtgcactacacaggaatgttggaggacggaaagaaaatggacagttcaagagatcggaacaaaccattcaaattcatgttgggaaaacaggaagtgatacggggctgggaagagggtgtagcgcaaatgtccgttggtcaacgagcaaaactcacgataagtcccgattatgcttacggcgcaaccggtcacccgggcatcataccgcctcatgcgactttggtctttgatgtggagctgttgaaacttgaaactcgcggagtacaggttgaaacaatatcacccggggacgggcggacttttccgaagagaggtcagacctgcgtcgtccattataccggtatgctggaggacggaaagaaaatggacagctcacgggaccgaaataaaccattcaaatttatgttggggaaacaagaggttatcaggggctgggaggagggtgtggcccagatgtctgtcggtcagcgcgcgaaactcacaatctctccggattatgcgtatggggcgacagggcatccgggaattatccctccccacgctaccttggttttcgatgttgagcttctgaagttggagaccagaggagttcaagtggagacaatatctcctggggatggacggacgttccccaagcgcggccagacctgtgtagtccactacacagggatgcttgaagacggaaaaaagatggatagcagtagagatcgcaacaaaccatttaagttcatgctggggaagcaggaagtaatacgcggctgggaggaaggcgtggcacagatgagtgttggtcaacgggccaaacttactatttctcccgattatgcgtatggagccaccgggcaccctggcattatcccaccccatgccacattggtttttgacgttgaattgcttaaattggagaccaggggagtccaagtggaaacaatatcaccgggggatggtcggacttttcctaaaaggggccaaacctgtgtagtccattataccggaatgctcgaagacggaaagaaaatggactcttctagagaccgcaataagcccttcaagttcatgttgggtaagcaagaggtgatccggggctgggaagagggggtcgctcaaatgtccgtcggtcagcgagctaaactgactatttccccagactacgcatatggagcgactggccaccccggtattattcctccccatgcgactctcgtgttcgacgtagaactcttgaaattggaaacgtcagcccggaacaggcggaagagaggatccgacatccagatgacacagactacatcctccctgtctgcctctctgggagacagagtcaccatcagttgcagggcaagtcaggacattagtaaatatttaaattggtatcagcagaaaccagatggaactgttaaactcctgatctaccatacatcaagattacactcaggagtcccatcaaggttcagtggcagtgggtctggaacagattattctctcaccattagcaacctggagcaagaagatattgccacttacttttgccaacagggtaatacgcttccgtacacgttcggaggggggactaagttggaaataacaggtggcggtggctcgggcggtggtgggtcgggtggcggcggatctgaggtgaaactgcaggagtcaggacctggcctggtggcgccctcacagagcctgtccgtcacatgcactgtctcaggggtctcattacccgactatggtgtaagctggattcgccagcctccacgaaagggtctggagtggctgggagtaatatggggtagtgaaaccacatactataattcagctctcaaatccagactgaccatcatcaaggacaactccaagagccaagttttcttaaaaatgaacagtctgcaaactgatgacacagccatttactactgtgccaaacattattactacggtggtagctatgctatggactactggggtcaaggaacctcagtcaccgtctcctcagctagcaccacgacgccagcgccgcgaccaccaacaccggcgcccaccatcgcgtcgcagcccctgtccctgcgcccagaggcgtgccggccagcggcggggggcgcagtgcacacgagggggctggacttcgcctgtgattccggaatctacatctgggcgcccttggccgggacttgtggggtccttctcctgtcactggttatcaccctttactgcaaacggggcagaaagaaactcctgtatatattcaaacaaccatttatgagaccagtacaaactactcaagaggaagatggctgtagctgccgatttccagaagaagaagaaggaggatgtgaactgagagtgaagttcagcaggagcgcagacgcccccgcgtaccagcagggccagaaccagctctataacgagctcaatctaggacgaagagaggagtacgatgttttggacaagagacgtggccgggaccctgagatggggggaaagccgagaaggaagaaccctcaggaaggcctgtacaatgaactgcagaaagataagatggcggaggcctacagtgagattgggatgaaaggcgagcgccggaggggcaaggggcacgatggcctttaccagggtctcagtacagccaccaaggacacctacgacgcccttcacatgcaggccctgccccctcgctaa

SEQ ID NO: 978 - protein, 939 aa, Artificial Sequence
  source: /note="Description of Artificial Sequence: Synthetic polypeptide"
MALPVTALLLPLALLLHAARPGSRGVQVETISPGDGRTFPKRGQTCVVHYTGMLEDGKKMDSSRDRNKPFKFMLGKQEVIRGWEEGVAQMSVGQRAKLTISPDYAYGATGHPGIIPPHATLVFDVELLKLETRGVQVETISPGDGRTFPKRGQTCVVHYTGMLEDGKKMDSSRDRNKPFKFMLGKQEVIRGWEEGVAQMSVGQRAKLTISPDYAYGATGHPGIIPPHATLVFDVELLKLETRGVQVETISPGDGRTFPKRGQTCVVHYTGMLEDGKKMDSSRDRNKPFKFMLGKQEVIRGWEEGVAQMSVGQRAKLTISPDYAYGATGHPGIIPPHATLVFDVELLKLETRGVQVETISPGDGRTFPKRGQTCVVHYTGMLEDGKKMDSSRDRNKPFKFMLGKQEVIRGWEEGVAQMSVGQRAKLTISPDYAYGATGHPGIIPPHATLVFDVELLKLETSARNRRKRGSDIQMTQTTSSLSASLGDRVTISCRASQDISKYLNWYQQKPDGTVKLLIYHTSRLHSGVPSRFSGSGSGTDYSLTISNLEQEDIATYFCQQGNTLPYTFGGGTKLEITGGGGSGGGGSGGGGSEVKLQESGPGLVAPSQSLSVTCTVSGVSLPDYGVSWIRQPPRKGLEWLGVIWGSETTYYNSALKSRLTIIKDNSKSQVFLKMNSLQTDDTAIYYCAKHYYYGGSYAMDYWGQGTSVTVSSASTTTPAPRPPTPAPTIASQPLSLRPEACRPAAGGAVHTRGLDFACDSGIYIWAPLAGTCGVLLLSLVITLYCKRGRKKLLYIFKQPFMRPVQTTQEEDGCSCRFPEEEEGGCELRVKFSRSADAPAYQQGQNQLYNELNLGRREEYDVLDKRRGRDPEMGGKPRRKNPQEGLYNELQKDKMAEAYSEIGMKGERRRGKGHDGLYQGLSTATKDTYDALHMQALPPRZ

SEQ ID NO: 979 - protein, 436 aa, Artificial Sequence
  source: /note="Description of Artificial Sequence: Synthetic polypeptide"
RGVQVETISPGDGRTFPKRGQTCVVHYTGMLEDGKKFDSSRDRNKPFKFMLGKQEVIRGWEEGVAQMSVGQRAKLTISPDYAYGATGHPGIIPPHATLVFDVELLKLETRGVQVETISPGDGRTFPKRGQTCVVHYTGMLEDGKKMDSSRDRNKPFKFMLGKQEVIRGWEEGVAQMSVGQRAKLTISPDYAYGATGHPGIIPPHATLVFDVELLKLETRGVQVETISPGDGRTFPKRGQTCVVHYTGMLEDGKKMDSSRDRNKPFKFMLGKQEVIRGWEEGVAQMSVGQRAKLTISPDYAYGATGHPGIIPPHATLVFDVELLKLETRGVQVETISPGDGRTFPKRGQTCVVHYTGMLEDGKKMDSSRDRNKPFKFMLGKQEVIRGWEEGVAQMSVGQRAKLTISPDYAYGATGHPGIIPPHATLVFDVELLKLET

SEQ ID NO: 980 - protein, 436 aa, Artificial Sequence
  source: /note="Description of Artificial Sequence: Synthetic polypeptide"
RGVQVETISPGDGRTFPKRGQTCVVHYTGMLEDGKKMDSSRDRNKPFKFMLGKQEVIRGWEEGVAQMSVGQRAKLTISPDYAYGATGHPGIIPPHATLVFDVELLKLETRGVQVETISPGDGRTFPKRGQTCVVHYTGMLEDGKKMDSSRDRNKPFKFMLGKQEVIRGWEEGVAQMSVGQRAKLTISPDYAYGATGHPGIIPPHATLVFDVELLKLETRGVQVETISPGDGRTFPKRGQTCVVHYTGMLEDGKKMDSSRDRNKPFKFMLGKQEVIRGWEEGVAQMSVGQRAKLTISPDYAYGATGHPGIIPPHATLVFDVELLKLETRGVQVETISPGDGRTFPKRGQTCVVHYTGMLEDGKKMDSSRDRNKPFKFMLGKQEVIRGWEEGVAQMSVGQRAKLTISPDYAYGATGHPGIIPPHATLVFDVELLKLET

SEQ ID NO: 981 - protein, 8 aa, Artificial Sequence
  source: /note="Description of Artificial Sequence: Synthetic peptide"
SARNRQKR

SEQ ID NO: 982 - protein, 4 aa, Artificial Sequence
  source: /note="Description of Artificial Sequence: Synthetic peptide"
RGDS

SEQ ID NO: 983 - protein, 244 aa, Artificial Sequence
  source: /note="Description of Artificial Sequence: Synthetic polypeptide"
QVQLLESGAELVRPGSSVKISCKASGYAFSSYWMNWVKQRPGQGLEWIGQIYPGDGDTNYNGKFKGQATLTADKSSSTAYMQLSGLTSEDSAVYSCARKTISSVVDFYFDYWGQGTTVTGGGSGGGSGGGSGGGSELVLTQSPKFMSTSVGDRVSVTCKASQNVGTNVAWYQQKPGQSPKPLIYSATYRNSGVPDRFTGSGSGTDFTLTITNVQSKDLADYFCQYNRYPYTSFFFTKLEIKRRS

SEQ ID NO: 984 - protein, 464 aa, Artificial Sequence
  source: /note="Description of Artificial Sequence: Synthetic polypeptide"
QVQLLESGAELVRPGSSVKISCKASGYAFSSYWMNWVKQRPGQGLEWIGQIYPGDGDTNYNGKFKGQATLTADKSSSTAYMQLSGLTSEDSAVYSCARKTISSVVDFYFDYWGQGTTVTGGGSGGGSGGGSGGGSELVLTQSPKFMSTSVGDRVSVTCKASQNVGTNVAWYQQKPGQSPKPLIYSATYRNSGVPDRFTGSGSGTDFTLTITNVQSKDLADYFCQYNRYPYTSFFFTKLEIKRRSKIEVMYPPPYLDNEKSNGTIIHVKGKHLCPSPLFPGPSKPFWVLVVVGGVLACYSLLVTVAFIIFWVRSKRSRLLHSDYMNMTPRRPGPTRKHYQPYAPPRDFAAYRSRVKFSRSADAPAYQQGQNQLYNELNLGRREEYDVLDKRRGRDPEMGGKPRRKNPQEGLYNELQKDKMAEAYSEIGMKGERRRGKGHDGLYQGLSTATKDTYDALHMQALPPR

SEQ ID NO: 985 - protein, 246 aa, Artificial Sequence
  source: /note="Description of Artificial Sequence: Synthetic polypeptide"
DIQMTQTTSSLSASLGDRVTISCRASQDISKYLNWYQQKPDGTVKLLIYHTSRLHSGVPSRFSGSGSGTDYSLTISNLEQEDIATYFCQQGNTLPYTFGGGTKLEITGSTSGSGKPGSGEGSTKGEVKLQESGPGLVAPSQSLSVTCTVSGVSLPDYGVSWIRQPPRKGLEWLGVIWGSETTYYNSALKSRLTIIKDNSKSQVFLKMNSLQTDDTAIYYCAKHYYYGGSYAMDYWGQGTSVTVSSE

SEQ ID NO: 986 - protein, 439 aa, Artificial Sequence
  source: /note="Description of Artificial Sequence: Synthetic polypeptide"
DIQMTQTTSSLSASLGDRVTISCRASQDISKYLNWYQQKPDGTVKLLIYHTSRLHSGVPSRFSGSGSGTDYSLTISNLEQEDIATYFCQQGNTLPYTFGGGTKLEITGSTSGSGKPGSGEGSTKGEVKLQESGPGLVAPSQSLSVTCTVSGVSLPDYGVSWIRQPPRKGLEWLGVIWGSETTYYNSALKSRLTIIKDNSKSQVFLKMNSLQTDDTAIYYCAKHYYYGGSYAMDYWGQGTSVTVSSESKYGPPCPPCPMFWVLVVVGGVLACYSLLVTVAFIIFWVKRGRKKLLYIFKQPFMRPVQTTQEEDGCSCRFEEEEGGCELRVKFSRSADAPAYQQGQNQLYNELNLGRREEYDVLDKRRGRDPEMGGKPRRKNPQEGLYNELQKDKMAEAYSEIGMKGERRRGKGHDGLYQGLSTATKDTYDALHMQALPPRL

SEQ ID NO: 987 - protein, 819 aa, Artificial Sequence
  source: /note="Description of Artificial Sequence: Synthetic polypeptide"
DIQMTQTTSSLSASLGDRVTISCRASQDISKYLNWYQQKPDGTVKLLIYHTSRLHSGVPSRFSGSGSGTDYSLTISNLEQEDIATYFCQQGNTLPYTFGGGTKLEITGSTSGSGKPGSGEGSTKGEVKLQESGPGLVAPSQSLSVTCTVSGVSLPDYGVSWIRQPPRKGLEWLGVIWGSETTYYNSALKSRLTIIKDNSKSQVFLKMNSLQTDDTAIYYCAKHYYYGGSYAMDYWGQGTSVTVSSESKYGPPCPPCPMFWVLVVVGGVLACYSLLVTVAFIIFWVKRGRKKLLYIFKQPFMRPVQTTQEEDGCSCRFEEEEGGCELRVKFSRSADAPAYQQGQNQLYNELNLGRREEYDVLDKRRGRDPEMGGKPRRKNPQEGLYNELQKDKMAEAYSEIGMKGERRRGKGHDGLYQGLSTATKDTYDALHMQALPPRLEGGGEGRGSLLTCGDVEENPGPRMLLLVTSLLLCELPHPAFLLIPRKVCNGIGIGEFKDSLSINATNIKHFKNCTSISGDLHILPVAFRGDSFTHTPPLDPQELDILKTVKEITGFLLIQAWPENRTDLHAFENLEIIRGRTKQHGQFSLAVVSLNITSLGLRSLKEISDGDVIISGNKNLCYANTINWKKLFGTSGQKTKIISNRGENSCKATGQVCHALCSPEGCWGPEPRDCVSCRNVSRGRECVDKCNLLEGEPREFVENSECIQCHPECLPQAMNITCTGRGPDNCIQCAHYIDGPHCVKTCPAGVMGENNTLVWKYADAGHVCHLCHPNCTYGCTGPGLEGCPTNGPKIPSIATGMVGALLLLLVVALGIGLFM

SEQ ID NO: 988 - protein, 245 aa, Artificial Sequence
  source: /note="Description of Artificial Sequence: Synthetic polypeptide"
DIQMTQTTSSLSASLGDRVTISCRASQDISKYLNWYQQKPDGTVKLLIYHTSRLHSGVPSRFSGSGSGTDYSLTISNLEQEDIATYFCQQGNTLPYTFGGGTKLEITGSTSGSGKPGSGEGSTKGEVKLQESGPGLVAPSQSLSVTCTVSGVSLPDYGVSWIRQPPRKGLEWLGVIWGSETTYYNSALKSRLTIIKDNSKSQVFLKMNSLQTDDTAIYYCAKHYYYGGSYAMDYWGQGTSVTVSS

SEQ ID NO: 989 - protein, 467 aa, Artificial Sequence
  source: /note="Description of Artificial Sequence: Synthetic polypeptide"
DIQMTQTTSSLSASLGDRVTISCRASQDISKYLNWYQQKPDGTVKLLIYHTSRLHSGVPSRFSGSGSGTDYSLTISNLEQEDIATYFCQQGNTLPYTFGGGTKLEITGSTSGSGKPGSGEGSTKGEVKLQESGPGLVAPSQSLSVTCTVSGVSLPDYGVSWIRQPPRKGLEWLGVIWGSETTYYNSALKSRLTIIKDNSKSQVFLKMNSLQTDDTAIYYCAKHYYYGGSYAMDYWGQGTSVTVSSAAAIEVMYPPPYLDNEKSNGTIIHVKGKHLCPSPLFPGPSKPFWVLVVVGGVLACYSLLVTVAFIIFWVRSKRSRLLHSDYMNMTPRRPGPTRKHYQPYAPPRDFAAYRSRVKFSRSADAPAYQQGQNQLYNELNLGRREEYDVLDKRRGRDPEMGGKPRRKNPQEGLYNELQKDKMAEAYSEIGMKGERRRGKGHDGLYQGLSTATKDTYDALHMQALPPR

SEQ ID NO: 990 - protein, 751 aa, Artificial Sequence
  source: /note="Description of Artificial Sequence: Synthetic polypeptide"
MALPVTALLLPLALLLHAARPSLALSLTADQMVSALLDAEPPILYSEYDPTRPFSEASMMGLLTNLADRELVHMINWAKRVPGFVDLALHDQVHLLECAWMEILMIGLVWRSMEHPGKLLFAPNLLLDRNQGKCVEGGVEIFDMLLATSSRFRMMNLQGEEFVCLKSIILLNSGVYTFLSSTLKSLEEKDHIHRVLDKITDTLIHLMAKAGLTLQQQHQRLAQLLLILSHIRHMSSKRMEHLYSMKCKNVVPLSDLLLEMLDAHRLGTGAEDPRPSRKRRSLGDVGEIVMTQSPATLSLSPGERATLSCRASQDISKYLNWYQQKPGQAPRLLIYHTSRLHSGIPARFSGSGSGTDYTLTISSLQPEDFAVYFCQQGNTLPYTFGQGTKLEIKGGGGSGGGGSGGGGSQVQLQESGPGLVKPSETLSLTCTVSGVSLPDYGVSWIRQPPGKGLEWIGVIWGSETTYYSSSLKSRVTISKDNSKNQVSLKLSSVTAADTAVYYCAKHYYYGGSYAMDYWGQGTLVTVSSTTTPAPRPPTPAPTIASQPLSLRPEACRPAAGGAVHTRGLDFACDIYIWAPLAGTCGVLLLSLVITLYCKRGRKKLLYIFKQPFMRPVQTTQEEDGCSCRFPEEEEGGCELRVKFSRSADAPAYQQGQNQLYNELNLGRREEYDVLDKRRGRDPEMGGKPRRKNPQEGLYNELQKDKMAEAYSEIGMKGERRRGKGHDGLYQGLSTATKDTYDALHMQALPPR

SEQ ID NO: 991 - protein, 751 aa, Artificial Sequence
  source: /note="Description of Artificial Sequence: Synthetic polypeptide"
MALPVTALLLPLALLLHAARPSLALSLTADQMVSALLDAEPPILYSEYDPTRPFSEASMMGLLTNLADRELVHMINWAKRVPGFVDLTLHDQVHLLECAWMEILMIGLVWRSMEHPGKLLFAPNLLLDRNQGKCVEGGVEIFDMLLATSSRFRMMNLQGEEFVCLKSIILLNSGVYTFLSSTLKSLEEKDHIHRVLDKITDTLIHLMAKAGLTLQQQHQRLAQLLLILSHIRHMSNKRMEHLYSMKCKNVVPLSDLLLEMLDAHRLGTGAEDPRPSRKRRSLGDVGEIVMTQSPATLSLSPGERATLSCRASQDISKYLNWYQQKPGQAPRLLIYHTSRLHSGIPARFSGSGSGTDYTLTISSLQPEDFAVYFCQQGNTLPYTFGQGTKLEIKGGGGSGGGGSGGGGSQVQLQESGPGLVKPSETLSLTCTVSGVSLPDYGVSWIRQPPGKGLEWIGVIWGSETTYYSSSLKSRVTISKDNSKNQVSLKLSSVTAADTAVYYCAKHYYYGGSYAMDYWGQGTLVTVSSTTTPAPRPPTPAPTIASQPLSLRPEACRPAAGGAVHTRGLDFACDIYIWAPLAGTCGVLLLSLVITLYCKRGRKKLLYIFKQPFMRPVQTTQEEDGCSCRFPEEEEGGCELRVKFSRSADAPAYQQGQNQLYNELNLGRREEYDVLDKRRGRDPEMGGKPRRKNPQEGLYNELQKDKMAEAYSEIGMKGERRRGKGHDGLYQGLSTATKDTYDALHMQALPPR

SEQ ID NO: 992 - protein, 745 aa, Artificial Sequence
  source: /note="Description of Artificial Sequence: Synthetic polypeptide"
MALPVTALLLPLALLLHAARPSLALSLTADQMVSALLDAEPPILYSEYDPTRPFSEASMMGLLTNLADRELVHMINWAKRVPGFVDLALHDQVHLLECAWMEILMIGLVWRSMEHPGKLLFAPNLLLDRNQGKCVEGGVEIFDMLLATSSRFRMMNLQGEEFVCLKSIILLNSGVYTFLSSTLKSLEEKDHIHRVLDKITDTLIHLMAKAGLTLQQQHQRLAQLLLILSHIRHMSSKRMEHLYSMKCKNVVPLSDLLLEMLDAHRLGTGAEDPRPSRKRREIVMTQSPATLSLSPGERATLSCRASQDISKYLNWYQQKPGQAPRLLIYHTSRLHSGIPARFSGSGSGTDYTLTISSLQPEDFAVYFCQQGNTLPYTFGQGTKLEIKGGGGSGGGGSGGGGSQVQLQESGPGLVKPSETLSLTCTVSGVSLPDYGVSWIRQPPGKGLEWIGVIWGSETTYYSSSLKSRVTISKDNSKNQVSLKLSSVTAADTAVYYCAKHYYYGGSYAMDYWGQGTLVTVSSTTTPAPRPPTPAPTIASQPLSLRPEACRPAAGGAVHTRGLDFACDIYIWAPLAGTCGVLLLSLVITLYCKRGRKKLLYIFKQPFMRPVQTTQEEDGCSCRFPEEEEGGCELRVKFSRSADAPAYQQGQNQLYNELNLGRREEYDVLDKRRGRDPEMGGKPRRKNPQEGLYNELQKDKMAEAYSEIGMKGERRRGKGHDGLYQGLSTATKDTYDALHMQALPPR

SEQ ID NO: 993 - protein, 745 aa, Artificial Sequence
  source: /note="Description of Artificial Sequence: Synthetic polypeptide"
MALPVTALLLPLALLLHAARPSLALSLTADQMVSALLDAEPPILYSEYDPTRPFSEASMMGLLTNLADRELVHMINWAKRVPGFVDLTLHDQVHLLECAWMEILMIGLVWRSMEHPGKLLFAPNLLLDRNQGKCVEGGVEIFDMLLATSSRFRMMNLQGEEFVCLKSIILLNSGVYTFLSSTLKSLEEKDHIHRVLDKITDTLIHLMAKAGLTLQQQHQRLAQLLLILSHIRHMSNKRMEHLYSMKCKNVVPLSDLLLEMLDAHRLGTGAEDPRPSRKRREIVMTQSPATLSLSPGERATLSCRASQDISKYLNWYQQKPGQAPRLLIYHTSRLHSGIPARFSGSGSGTDYTLTISSLQPEDFAVYFCQQGNTLPYTFGQGTKLEIKGGGGSGGGGSGGGGSQVQLQESGPGLVKPSETLSLTCTVSGVSLPDYGVSWIRQPPGKGLEWIGVIWGSETTYYSSSLKSRVTISKDNSKNQVSLKLSSVTAADTAVYYCAKHYYYGGSYAMDYWGQGTLVTVSSTTTPAPRPPTPAPTIASQPLSLRPEACRPAAGGAVHTRGLDFACDIYIWAPLAGTCGVLLLSLVITLYCKRGRKKLLYIFKQPFMRPVQTTQEEDGCSCRFPEEEEGGCELRVKFSRSADAPAYQQGQNQLYNELNLGRREEYDVLDKRRGRDPEMGGKPRRKNPQEGLYNELQKDKMAEAYSEIGMKGERRRGKGHDGLYQGLSTATKDTYDALHMQALPPR

SEQ ID NO: 994 - protein, 752 aa, Artificial Sequence
  source: /note="Description of Artificial Sequence: Synthetic polypeptide"
MALPVTALLLPLALLLHAARPSLALSLTADQMVSALLDAEPPILYSEYDPTRPFSEASMMGLLTNLADRELVHMINWAKRVPGFVDLALHDQVHLLECAWMEILMIGLVWRSMEHPGKLLFAPNLLLDRNQGKCVEGGVEIFDMLLATSSRFRMMNLQGEEFVCLKSIILLNSGVYTFLSSTLKSLEEKDHIHRVLDKITDTLIHLMAKAGLTLQQQHQRLAQLLLILSHIRHMSSKRMEHLYSMKCKNVVPLSDLLLEMLDAHRLGTGAEDPRPSRKRRSLGDVGQVQLVQSGAEVKKPGASVKVSCKASGYTFTGYYMHWVRQAPGQGLEWMGWINPNSGGTNYAQKFQGRVTLTRDTSISTVYMELSRLRSDDTAVYYCARDMNILATVPFDIWGQGTMVTVSSGGGGSGGGGSGGGGSDIQMTQSPSSLSASVGDRVTITCRASQSISSYLNWYQQKPGKAPKLLIYAASSLQSGVPSRFSGSGSGTDFTLTVNSLQPEDFATYYCQQGDSVPLTFGGGTRLEIKTTTPAPRPPTPAPTIASQPLSLRPEACRPAAGGAVHTRGLDFACDIYIWAPLAGTCGVLLLSLVITLYCKRGRKKLLYIFKQPFMRPVQTTQEEDGCSCRFPEEEEGGCELRVKFSRSADAPAYQQGQNQLYNELNLGRREEYDVLDKRRGRDPEMGGKPRRKNPQEGLYNELQKDKMAEAYSEIGMKGERRRGKGHDGLYQGLSTATKDTYDALHMQALPPR

SEQ ID NO: 995 - protein, 752 aa, Artificial Sequence
  source: /note="Description of Artificial Sequence: Synthetic polypeptide"
MALPVTALLLPLALLLHAARPSLALSLTADQMVSALLDAEPPILYSEYDPTRPFSEASMMGLLTNLADRELVHMINWAKRVPGFVDLTLHDQVHLLECAWMEILMIGLVWRSMEHPGKLLFAPNLLLDRNQGKCVEGGVEIFDMLLATSSRFRMMNLQGEEFVCLKSIILLNSGVYTFLSSTLKSLEEKDHIHRVLDKITDTLIHLMAKAGLTLQQQHQRLAQLLLILSHIRHMSNKRMEHLYSMKCKNVVPLSDLLLEMLDAHRLGTGAEDPRPSRKRRSLGDVGQVQLVQSGAEVKKPGASVKVSCKASGYTFTGYYMHWVRQAPGQGLEWMGWINPNSGGTNYAQKFQGRVTLTRDTSISTVYMELSRLRSDDTAVYYCARDMNILATVPFDIWGQGTMVTVSSGGGGSGGGGSGGGGSDIQMTQSPSSLSASVGDRVTITCRASQSISSYLNWYQQKPGKAPKLLIYAASSLQSGVPSRFSGSGSGTDFTLTVNSLQPEDFATYYCQQGDSVPLTFGGGTRLEIKTTTPAPRPPTPAPTIASQPLSLRPEACRPAAGGAVHTRGLDFACDIYIWAPLAGTCGVLLLSLVITLYCKRGRKKLLYIFKQPFMRPVQTTQEEDGCSCRFPEEEEGGCELRVKFSRSADAPAYQQGQNQLYNELNLGRREEYDVLDKRRGRDPEMGGKPRRKNPQEGLYNELQKDKMAEAYSEIGMKGERRRGKGHDGLYQGLSTATKDTYDALHMQALPPR

SEQ ID NO: 996 - protein, 746 aa, Artificial Sequence
  source: /note="Description of Artificial Sequence: Synthetic polypeptide"
MALPVTALLLPLALLLHAARPSLALSLTADQMVSALLDAEPPILYSEYDPTRPFSEASMMGLLTNLADRELVHMINWAKRVPGFVDLALHDQVHLLECAWMEILMIGLVWRSMEHPGKLLFAPNLLLDRNQGKCVEGGVEIFDMLLATSSRFRMMNLQGEEFVCLKSIILLNSGVYTFLSSTLKSLEEKDHIHRVLDKITDTLIHLMAKAGLTLQQQHQRLAQLLLILSHIRHMSSKRMEHLYSMKCKNVVPLSDLLLEMLDAHRLGTGAEDPRPSRKRRQVQLVQSGAEVKKPGASVKVSCKASGYTFTGYYMHWVRQAPGQGLEWMGWINPNSGGTNYAQKFQGRVTLTRDTSISTVYMELSRLRSDDTAVYYCARDMNILATVPFDIWGQGTMVTVSSGGGGSGGGGSGGGGSDIQMTQSPSSLSASVGDRVTITCRASQSISSYLNWYQQKPGKAPKLLIYAASSLQSGVPSRFSGSGSGTDFTLTVNSLQPEDFATYYCQQGDSVPLTFGGGTRLEIKTTTPAPRPPTPAPTIASQPLSLRPEACRPAAGGAVHTRGLDFACDIYIWAPLAGTCGVLLLSLVITLYCKRGRKKLLYIFKQPFMRPVQTTQEEDGCSCRFPEEEEGGCELRVKFSRSADAPAYQQGQNQLYNELNLGRREEYDVLDKRRGRDPEMGGKPRRKNPQEGLYNELQKDKMAEAYSEIGMKGERRRGKGHDGLYQGLSTATKDTYDALHMQALPPR

SEQ ID NO: 997 - protein, 746 aa, Artificial Sequence
  source: /note="Description of Artificial Sequence: Synthetic polypeptide"
MALPVTALLLPLALLLHAARPSLALSLTADQMVSALLDAEPPILYSEYDPTRPFSEASMMGLLTNLADRELVHMINWAKRVPGFVDLTLHDQVHLLECAWMEILMIGLVWRSMEHPGKLLFAPNLLLDRNQGKCVEGGVEIFDMLLATSSRFRMMNLQGEEFVCLKSIILLNSGVYTFLSSTLKSLEEKDHIHRVLDKITDTLIHLMAKAGLTLQQQHQRLAQLLLILSHIRHMSNKRMEHLYSMKCKNVVPLSDLLLEMLDAHRLGTGAEDPRPSRKRRQVQLVQSGAEVKKPGASVKVSCKASGYTFTGYYMHWVRQAPGQGLEWMGWINPNSGGTNYAQKFQGRVTLTRDTSISTVYMELSRLRSDDTAVYYCARDMNILATVPFDIWGQGTMVTVSSGGGGSGGGGSGGGGSDIQMTQSPSSLSASVGDRVTITCRASQSISSYLNWYQQKPGKAPKLLIYAASSLQSGVPSRFSGSGSGTDFTLTVNSLQPEDFATYYCQQGDSVPLTFGGGTRLEIKTTTPAPRPPTPAPTIASQPLSLRPEACRPAAGGAVHTRGLDFACDIYIWAPLAGTCGVLLLSLVITLYCKRGRKKLLYIFKQPFMRPVQTTQEEDGCSCRFPEEEEGGCELRVKFSRSADAPAYQQGQNQLYNELNLGRREEYDVLDKRRGRDPEMGGKPRRKNPQEGLYNELQKDKMAEAYSEIGMKGERRRGKGHDGLYQGLSTATKDTYDALHMQALPPR

SEQ ID NO: 998 - protein, 748 aa, Artificial Sequence
  source: /note="Description of Artificial Sequence: Synthetic polypeptide"
MALPVTALLLPLALLLHAARPSLALSLTADQMVSALLDAEPPILYSEYDPTRPFSEASMMGLLTNLADRELVHMINWAKRVPGFVDLALHDQVHLLECAWMEILMIGLVWRSMEHPGKLLFAPNLLLDRNQGKCVEGGVEIFDMLLATSSRFRMMNLQGEEFVCLKSIILLNSGVYTFLSSTLKSLEEKDHIHRVLDKITDTLIHLMAKAGLTLQQQHQRLAQLLLILSHIRHMSSKRMEHLYSMKCKNVVPLSDLLLEMLDAHRLGTGAEDPRPSRKRRSLGDVGEVQLVESGGGLVQPGGSLRLSCAVSGFALSNHGMSWVRRAPGKGLEWVSGIVYSGSTYYAASVKGRFTISRDNSRNTLYLQMNSLRPEDTAIYYCSAHGGESDVWGQGTTVTVSSASGGGGSGGRASGGGGSDIQLTQSPSSLSASVGDRVTITCRASQSISSYLNWYQQKPGKAPKLLIYAASSLQSGVPSRFSGSGSGTDFTLTISSLQPEDFATYYCQQSYSTPYTFGQGTKVEIKTTTPAPRPPTPAPTIASQPLSLRPEACRPAAGGAVHTRGLDFACDIYIWAPLAGTCGVLLLSLVITLYCKRGRKKLLYIFKQPFMRPVQTTQEEDGCSCRFPEEEEGGCELRVKFSRSADAPAYQQGQNQLYNELNLGRREEYDVLDKRRGRDPEMGGKPRRKNPQEGLYNELQKDKMAEAYSEIGMKGERRRGKGHDGLYQGLSTATKDTYDALHMQALPPR

SEQ ID NO: 999 - protein, 748 aa, Artificial Sequence
  source: /note="Description of Artificial Sequence: Synthetic polypeptide"
MALPVTALLLPLALLLHAARPSLALSLTADQMVSALLDAEPPILYSEYDPTRPFSEASMMGLLTNLADRELVHMINWAKRVPGFVDLTLHDQVHLLECAWMEILMIGLVWRSMEHPGKLLFAPNLLLDRNQGKCVEGGVEIFDMLLATSSRFRMMNLQGEEFVCLKSIILLNSGVYTFLSSTLKSLEEKDHIHRVLDKITDTLIHLMAKAGLTLQQQHQRLAQLLLILSHIRHMSNKRMEHLYSMKCKNVVPLSDLLLEMLDAHRLGTGAEDPRPSRKRRSLGDVGEVQLVESGGGLVQPGGSLRLSCAVSGFALSNHGMSWVRRAPGKGLEWVSGIVYSGSTYYAASVKGRFTISRDNSRNTLYLQMNSLRPEDTAIYYCSAHGGESDVWGQGTTVTVSSASGGGGSGGRASGGGGSDIQLTQSPSSLSASVGDRVTITCRASQSISSYLNWYQQKPGKAPKLLIYAASSLQSGVPSRFSGSGSGTDFTLTISSLQPEDFATYYCQQSYSTPYTFGQGTKVEIKTTTPAPRPPTPAPTIASQPLSLRPEACRPAAGGAVHTRGLDFACDIYIWAPLAGTCGVLLLSLVITLYCKRGRKKLLYIFKQPFMRPVQTTQEEDGCSCRFPEEEEGGCELRVKFSRSADAPAYQQGQNQLYNELNLGRREEYDVLDKRRGRDPEMGGKPRRKNPQEGLYNELQKDKMAEAYSEIGMKGERRRGKGHDGLYQGLSTATKDTYDALHMQALPPR

SEQ ID NO: 1000 - protein, 742 aa, Artificial Sequence
  source: /note="Description of Artificial Sequence: Synthetic polypeptide"
MALPVTALLLPLALLLHAARPSLALSLTADQMVSALLDAEPPILYSEYDPTRPFSEASMMGLLTNLADRELVHMINWAKRVPGFVDLALHDQVHLLECAWMEILMIGLVWRSMEHPGKLLFAPNLLLDRNQGKCVEGGVEIFDMLLATSSRFRMMNLQGEEFVCLKSIILLNSGVYTFLSSTLKSLEEKDHIHRVLDKITDTLIHLMAKAGLTLQQQHQRLAQLLLILSHIRHMSSKRMEHLYSMKCKNVVPLSDLLLEMLDAHRLGTGAEDPRPSRKRREVQLVESGGGLVQPGGSLRLSCAVSGFALSNHGMSWVRRAPGKGLEWVSGIVYSGSTYYAASVKGRFTISRDNSRNTLYLQMNSLRPEDTAIYYCSAHGGESDVWGQGTTVTVSSASGGGGSGGRASGGGGSDIQLTQSPSSLSASVGDRVTITCRASQSISSYLNWYQQKPGKAPKLLIYAASSLQSGVPSRFSGSGSGTDFTLTISSLQPEDFATYYCQQSYSTPYTFGQGTKVEIKTTTPAPRPPTPAPTIASQPLSLRPEACRPAAGGAVHTRGLDFACDIYIWAPLAGTCGVLLLSLVITLYCKRGRKKLLYIFKQPFMRPVQTTQEEDGCSCRFPEEEEGGCELRVKFSRSADAPAYQQGQNQLYNELNLGRREEYDVLDKRRGRDPEMGGKPRRKNPQEGLYNELQKDKMAEAYSEIGMKGERRRGKGHDGLYQGLSTATKDTYDALHMQALPPR

SEQ ID NO: 1001 - protein, 742 aa, Artificial Sequence
  source: /note="Description of Artificial Sequence: Synthetic polypeptide"
MALPVTALLLPLALLLHAARPSLALSLTADQMVSALLDAEPPILYSEYDPTRPFSEASMMGLLTNLADRELVHMINWAKRVPGFVDLTLHDQVHLLECAWMEILMIGLVWRSMEHPGKLLFAPNLLLDRNQGKCVEGGVEIFDMLLATSSRFRMMNLQGEEFVCLKSIILLNSGVYTFLSSTLKSLEEKDHIHRVLDKITDTLIHLMAKAGLTLQQQHQRLAQLLLILSHIRHMSNKRMEHLYSMKCKNVVPLSDLLLEMLDAHRLGTGAEDPRPSRKRREVQLVESGGGLVQPGGSLRLSCAVSGFALSNHGMSWVRRAPGKGLEWVSGIVYSGSTYYAASVKGRFTISRDNSRNTLYLQMNSLRPEDTAIYYCSAHGGESDVWGQGTTVTVSSASGGGGSGGRASGGGGSDIQLTQSPSSLSASVGDRVTITCRASQSISSYLNWYQQKPGKAPKLLIYAASSLQSGVPSRFSGSGSGTDFTLTISSLQPEDFATYYCQQSYSTPYTFGQGTKVEIKTTTPAPRPPTPAPTIASQPLSLRPEACRPAAGGAVHTRGLDFACDIYIWAPLAGTCGVLLLSLVITLYCKRGRKKLLYIFKQPFMRPVQTTQEEDGCSCRFPEEEEGGCELRVKFSRSADAPAYQQGQNQLYNELNLGRREEYDVLDKRRGRDPEMGGKPRRKNPQEGLYNELQKDKMAEAYSEIGMKGERRRGKGHDGLYQGLSTATKDTYDALHMQALPPR

SEQ ID NO: 1002 - protein, 752 aa, Artificial Sequence
  source: /note="Description of Artificial Sequence: Synthetic polypeptide"
MALPVTALLLPLALLLHAARPDSLALSLTADQMVSALLDAEPPILYSEYDPTRPFSEASMMGLLTNLADRELVHMINWAKRVPGFVDLALHDQVHLLECAWMEILMIGLVWRSMEHPGKLLFAPNLLLDRNQGKCVEGGVEIFDMLLATSSRFRMMNLQGEEFVCLKSIILLNSGVYTFLSSTLKSLEEKDHIHRVLDKITDTLIHLMAKAGLTLQQQHQRLAQLLLILSHIRHMSSKRMEHLYSMKCKNVVPLSDLLLEMLDAHRLGTGAEDPRPSRKRRSLGDVGEIVMTQSPATLSLSPGERATLSCRASQDISKYLNWYQQKPGQAPRLLIYHTSRLHSGIPARFSGSGSGTDYTLTISSLQPEDFAVYFCQQGNTLPYTFGQGTKLEIKGGGGSGGGGSGGGGSQVQLQESGPGLVKPSETLSLTCTVSGVSLPDYGVSWIRQPPGKGLEWIGVIWGSETTYYSSSLKSRVTISKDNSKNQVSLKLSSVTAADTAVYYCAKHYYYGGSYAMDYWGQGTLVTVSSTTTPAPRPPTPAPTIASQPLSLRPEACRPAAGGAVHTRGLDFACDIYIWAPLAGTCGVLLLSLVITLYCKRGRKKLLYIFKQPFMRPVQTTQEEDGCSCRFPEEEEGGCELRVKFSRSADAPAYQQGQNQLYNELNLGRREEYDVLDKRRGRDPEMGGKPRRKNPQEGLYNELQKDKMAEAYSEIGMKGERRRGKGHDGLYQGLSTATKDTYDALHMQALPPR

SEQ ID NO: 1003 - protein, 752 aa, Artificial Sequence
  source: /note="Description of Artificial Sequence: Synthetic polypeptide"
MALPVTALLLPLALLLHAARPDSLALSLTADQMVSALLDAEPPILYSEYDPTRPFSEASMMGLLTNLADRELVHMINWAKRVPGFVDLTLHDQVHLLECAWMEILMIGLVWRSMEHPGKLLFAPNLLLDRNQGKCVEGGVEIFDMLLATSSRFRMMNLQGEEFVCLKSIILLNSGVYTFLSSTLKSLEEKDHIHRVLDKITDTLIHLMAKAGLTLQQQHQRLAQLLLILSHIRHMSNKRMEHLYSMKCKNVVPLSDLLLEMLDAHRLGTGAEDPRPSRKRRSLGDVGEIVMTQSPATLSLSPGERATLSCRASQDISKYLNWYQQKPGQAPRLLIYHTSRLHSGIPARFSGSGSGTDYTLTISSLQPEDFAVYFCQQGNTLPYTFGQGTKLEIKGGGGSGGGGSGGGGSQVQLQESGPGLVKPSETLSLTCTVSGVSLPDYGVSWIRQPPGKGLEWIGVIWGSETTYYSSSLKSRVTISKDNSKNQVSLKLSSVTAADTAVYYCAKHYYYGGSYAMDYWGQGTLVTVSSTTTPAPRPPTPAPTIASQPLSLRPEACRPAAGGAVHTRGLDFACDIYIWAPLAGTCGVLLLSLVITLYCKRGRKKLLYIFKQPFMRPVQTTQEEDGCSCRFPEEEEGGCELRVKFSRSADAPAYQQGQNQLYNELNLGRREEYDVLDKRRGRDPEMGGKPRRKNPQEGLYNELQKDKMAEAYSEIGMKGERRRGKGHDGLYQGLSTATKDTYDALHMQALPPR

SEQ ID NO: 1004 - protein, 746 aa, Artificial Sequence
  source: /note="Description of Artificial Sequence: Synthetic polypeptide"
MALPVTALLLPLALLLHAARPDSLALSLTADQMVSALLDAEPPILYSEYDPTRPFSEASMMGLLTNLADRELVHMINWAKRVPGFVDLALHDQVHLLECAWMEILMIGLVWRSMEHPGKLLFAPNLLLDRNQGKCVEGGVEIFDMLLATSSRFRMMNLQGEEFVCLKSIILLNSGVYTFLSSTLKSLEEKDHIHRVLDKITDTLIHLMAKAGLTLQQQHQRLAQLLLILSHIRHMSSKRMEHLYSMKCKNVVPLSDLLLEMLDAHRLGTGAEDPRPSRKRREIVMTQSPATLSLSPGERATLSCRASQDISKYLNWYQQKPGQAPRLLIYHTSRLHSGIPARFSGSGSGTDYTLTISSLQPEDFAVYFCQQGNTLPYTFGQGTKLEIKGGGGSGGGGSGGGGSQVQLQESGPGLVKPSETLSLTCTVSGVSLPDYGVSWIRQPPGKGLEWIGVIWGSETTYYSSSLKSRVTISKDNSKNQVSLKLSSVTAADTAVYYCAKHYYYGGSYAMDYWGQGTLVTVSSTTTPAPRPPTPAPTIASQPLSLRPEACRPAAGGAVHTRGLDFACDIYIWAPLAGTCGVLLLSLVITLYCKRGRKKLLYIFKQPFMRPVQTTQEEDGCSCRFPEEEEGGCELRVKFSRSADAPAYQQGQNQLYNELNLGRREEYDVLDKRRGRDPEMGGKPRRKNPQEGLYNELQKDKMAEAYSEIGMKGERRRGKGHDGLYQGLSTATKDTYDALHMQALPPR

SEQ ID NO: 1005 - protein, 746 aa, Artificial Sequence
  source: /note="Description of Artificial Sequence: Synthetic polypeptide"
MALPVTALLLPLALLLHAARPDSLALSLTADQMVSALLDAEPPILYSEYDPTRPFSEASMMGLLTNLADRELVHMINWAKRVPGFVDLTLHDQVHLLECAWMEILMIGLVWRSMEHPGKLLFAPNLLLDRNQGKCVEGGVEIFDMLLATSSRFRMMNLQGEEFVCLKSIILLNSGVYTFLSSTLKSLEEKDHIHRVLDKITDTLIHLMAKAGLTLQQQHQRLAQLLLILSHIRHMSNKRMEHLYSMKCKNVVPLSDLLLEMLDAHRLGTGAEDPRPSRKRREIVMTQSPATLSLSPGERATLSCRASQDISKYLNWYQQKPGQAPRLLIYHTSRLHSGIPARFSGSGSGTDYTLTISSLQPEDFAVYFCQQGNTLPYTFGQGTKLEIKGGGGSGGGGSGGGGSQVQLQESGPGLVKPSETLSLTCTVSGVSLPDYGVSWIRQPPGKGLEWIGVIWGSETTYYSSSLKSRVTISKDNSKNQVSLKLSSVTAADTAVYYCAKHYYYGGSYAMDYWGQGTLVTVSSTTTPAPRPPTPAPTIASQPLSLRPEACRPAAGGAVHTRGLDFACDIYIWAPLAGTCGVLLLSLVITLYCKRGRKKLLYIFKQPFMRPVQTTQEEDGCSCRFPEEEEGGCELRVKFSRSADAPAYQQGQNQLYNELNLGRREEYDVLDKRRGRDPEMGGKPRRKNPQEGLYNELQKDKMAEAYSEIGMKGERRRGKGHDGLYQGLSTATKDTYDALHMQALPPR

SEQ ID NO: 1006 - protein, 753 aa, Artificial Sequence
  source: /note="Description of Artificial Sequence: Synthetic polypeptide"
MALPVTALLLPLALLLHAARPDSLALSLTADQMVSALLDAEPPILYSEYDPTRPFSEASMMGLLTNLADRELVHMINWAKRVPGFVDLALHDQVHLLECAWMEILMIGLVWRSMEHPGKLLFAPNLLLDRNQGKCVEGGVEIFDMLLATSSRFRMMNLQGEEFVCLKSIILLNSGVYTFLSSTLKSLEEKDHIHRVLDKITDTLIHLMAKAGLTLQQQHQRLAQLLLILSHIRHMSSKRMEHLYSMKCKNVVPLSDLLLEMLDAHRLGTGAEDPRPSRKRRSLGDVGQVQLVQSGAEVKKPGASVKVSCKASGYTFTGYYMHWVRQAPGQGLEWMGWINPNSGGTNYAQKFQGRVTLTRDTSISTVYMELSRLRSDDTAVYYCARDMNILATVPFDIWGQGTMVTVSSGGGGSGGGGSGGGGSDIQMTQSPSSLSASVGDRVTITCRASQSISSYLNWYQQKPGKAPKLLIYAASSLQSGVPSRFSGSGSGTDFTLTVNSLQPEDFATYYCQQGDSVPLTFGGGTRLEIKTTTPAPRPPTPAPTIASQPLSLRPEACRPAAGGAVHTRGLDFACDIYIWAPLAGTCGVLLLSLVITLYCKRGRKKLLYIFKQPFMRPVQTTQEEDGCSCRFPEEEEGGCELRVKFSRSADAPAYQQGQNQLYNELNLGRREEYDVLDKRRGRDPEMGGKPRRKNPQEGLYNELQKDKMAEAYSEIGMKGERRRGKGHDGLYQGLSTATKDTYDALHMQALPPR

SEQ ID NO: 1007 - protein, 753 aa, Artificial Sequence
  source: /note="Description of Artificial Sequence: Synthetic polypeptide"
MALPVTALLLPLALLLHAARPDSLALSLTADQMVSALLDAEPPILYSEYDPTRPFSEASMMGLLTNLADRELVHMINWAKRVPGFVDLTLHDQVHLLECAWMEILMIGLVWRSMEHPGKLLFAPNLLLDRNQGKCVEGGVEIFDMLLATSSRFRMMNLQGEEFVCLKSIILLNSGVYTFLSSTLKSLEEKDHIHRVLDKITDTLIHLMAKAGLTLQQQHQRLAQLLLILSHIRHMSNKRMEHLYSMKCKNVVPLSDLLLEMLDAHRLGTGAEDPRPSRKRRSLGDVGQVQLVQSGAEVKKPGASVKVSCKASGYTFTGYYMHWVRQAPGQGLEWMGWINPNSGGTNYAQKFQGRVTLTRDTSISTVYMELSRLRSDDTAVYYCARDMNILATVPFDIWGQGTMVTVSSGGGGSGGGGSGGGGSDIQMTQSPSSLSASVGDRVTITCRASQSISSYLNWYQQKPGKAPKLLIYAASSLQSGVPSRFSGSGSGTDFTLTVNSLQPEDFATYYCQQGDSVPLTFGGGTRLEIKTTTPAPRPPTPAPTIASQPLSLRPEACRPAAGGAVHTRGLDFACDIYIWAPLAGTCGVLLLSLVITLYCKRGRKKLLYIFKQPFMRPVQTTQEEDGCSCRFPEEEEGGCELRVKFSRSADAPAYQQGQNQLYNELNLGRREEYDVLDKRRGRDPEMGGKPRRKNPQEGLYNELQKDKMAEAYSEIGMKGERRRGKGHDGLYQGLSTATKDTYDALHMQALPPR

SEQ ID NO: 1008 - protein, 747 aa, Artificial Sequence
  source: /note="Description of Artificial Sequence: Synthetic polypeptide"
MALPVTALLLPLALLLHAARPDSLALSLTADQMVSALLDAEPPILYSEYDPTRPFSEASMMGLLTNLADRELVHMINWAKRVPGFVDLALHDQVHLLECAWMEILMIGLVWRSMEHPGKLLFAPNLLLDRNQGKCVEGGVEIFDMLLATSSRFRMMNLQGEEFVCLKSIILLNSGVYTFLSSTLKSLEEKDHIHRVLDKITDTLIHLMAKAGLTLQQQHQRLAQLLLILSHIRHMSSKRMEHLYSMKCKNVVPLSDLLLEMLDAHRLGTGAEDPRPSRKRRQVQLVQSGAEVKKPGASVKVSCKASGYTFTGYYMHWVRQAPGQGLEWMGWINPNSGGTNYAQKFQGRVTLTRDTSISTVYMELSRLRSDDTAVYYCARDMNILATVPFDIWGQGTMVTVSSGGGGSGGGGSGGGGSDIQMTQSPSSLSASVGDRVTITCRASQSISSYLNWYQQKPGKAPKLLIYAASSLQSGVPSRFSGSGSGTDFTLTVNSLQPEDFATYYCQQGDSVPLTFGGGTRLEIKTTTPAPRPPTPAPTIASQPLSLRPEACRPAAGGAVHTRGLDFACDIYIWAPLAGTCGVLLLSLVITLYCKRGRKKLLYIFKQPFMRPVQTTQEEDGCSCRFPEEEEGGCELRVKFSRSADAPAYQQGQNQLYNELNLGRREEYDVLDKRRGRDPEMGGKPRRKNPQEGLYNELQKDKMAEAYSEIGMKGERRRGKGHDGLYQGLSTATKDTYDALHMQALPPR

SEQ ID NO: 1009 - protein, 747 aa, Artificial Sequence
  source: /note="Description of Artificial Sequence: Synthetic polypeptide"
MALPVTALLLPLALLLHAARPDSLALSLTADQMVSALLDAEPPILYSEYDPTRPFSEASMMGLLTNLADRELVHMINWAKRVPGFVDLTLHDQVHLLECAWMEILMIGLVWRSMEHPGKLLFAPNLLLDRNQGKCVEGGVEIFDMLLATSSRFRMMNLQGEEFVCLKSIILLNSGVYTFLSSTLKSLEEKDHIHRVLDKITDTLIHLMAKAGLTLQQQHQRLAQLLLILSHIRHMSNKRMEHLYSMKCKNVVPLSDLLLEMLDAHRLGTGAEDPRPSRKRRQVQLVQSGAEVKKPGASVKVSCKASGYTFTGYYMHWVRQAPGQGLEWMGWINPNSGGTNYAQKFQGRVTLTRDTSISTVYMELSRLRSDDTAVYYCARDMNILATVPFDIWGQGTMVTVSSGGGGSGGGGSGGGGSDIQMTQSPSSLSASVGDRVTITCRASQSISSYLNWYQQKPGKAPKLLIYAASSLQSGVPSRFSGSGSGTDFTLTVNSLQPEDFATYYCQQGDSVPLTFGGGTRLEIKTTTPAPRPPTPAPTIASQPLSLRPEACRPAAGGAVHTRGLDFACDIYIWAPLAGTCGVLLLSLVITLYCKRGRKKLLYIFKQPFMRPVQTTQEEDGCSCRFPEEEEGGCELRVKFSRSADAPAYQQGQNQLYNELNLGRREEYDVLDKRRGRDPEMGGKPRRKNPQEGLYNELQKDKMAEAYSEIGMKGERRRGKGHDGLYQGLSTATKDTYDALHMQALPPR

SEQ ID NO: 1010 - protein, 749 aa, Artificial Sequence
  source: /note="Description of Artificial Sequence: Synthetic polypeptide"
MALPVTALLLPLALLLHAARPDSLALSLTADQMVSALLDAEPPILYSEYDPTRPFSEASMMGLLTNLADRELVHMINWAKRVPGFVDLALHDQVHLLECAWMEILMIGLVWRSMEHPGKLLFAPNLLLDRNQGKCVEGGVEIFDMLLATSSRFRMMNLQGEEFVCLKSIILLNSGVYTFLSSTLKSLEEKDHIHRVLDKITDTLIHLMAKAGLTLQQQHQRLAQLLLILSHIRHMSSKRMEHLYSMKCKNVVPLSDLLLEMLDAHRLGTGAEDPRPSRKRRSLGDVGEVQLVESGGGLVQPGGSLRLSCAVSGFALSNHGMSWVRRAPGKGLEWVSGIVYSGSTYYAASVKGRFTISRDNSRNTLYLQMNSLRPEDTAIYYCSAHGGESDVWGQGTTVTVSSASGGGGSGGRASGGGGSDIQLTQSPSSLSASVGDRVTITCRASQSISSYLNWYQQKPGKAPKLLIYAASSLQSGVPSRFSGSGSGTDFTLTISSLQPEDFATYYCQQSYSTPYTFGQGTKVEIKTTTPAPRPPTPAPTIASQPLSLRPEACRPAAGGAVHTRGLDFACDIYIWAPLAGTCGVLLLSLVITLYCKRGRKKLLYIFKQPFMRPVQTTQEEDGCSCRFPEEEEGGCELRVKFSRSADAPAYQQGQNQLYNELNLGRREEYDVLDKRRGRDPEMGGKPRRKNPQEGLYNELQKDKMAEAYSEIGMKGERRRGKGHDGLYQGLSTATKDTYDALHMQALPPR

SEQ ID NO: 1011 - protein, 749 aa, Artificial Sequence
  source: /note="Description of Artificial Sequence: Synthetic polypeptide"
MALPVTALLLPLALLLHAARPDSLALSLTADQMVSALLDAEPPILYSEYDPTRPFSEASMMGLLTNLADRELVHMINWAKRVPGFVDLTLHDQVHLLECAWMEILMIGLVWRSMEHPGKLLFAPNLLLDRNQGKCVEGGVEIFDMLLATSSRFRMMNLQGEEFVCLKSIILLNSGVYTFLSSTLKSLEEKDHIHRVLDKITDTLIHLMAKAGLTLQQQHQRLAQLLLILSHIRHMSNKRMEHLYSMKCKNVVPLSDLLLEMLDAHRLGTGAEDPRPSRKRRSLGDVGEVQLVESGGGLVQPGGSLRLSCAVSGFALSNHGMSWVRRAPGKGLEWVSGIVYSGSTYYAASVKGRFTISRDNSRNTLYLQMNSLRPEDTAIYYCSAHGGESDVWGQGTTVTVSSASGGGGSGGRASGGGGSDIQLTQSPSSLSASVGDRVTITCRASQSISSYLNWYQQKPGKAPKLLIYAASSLQSGVPSRFSGSGSGTDFTLTISSLQPEDFATYYCQQSYSTPYTFGQGTKVEIKTTTPAPRPPTPAPTIASQPLSLRPEACRPAAGGAVHTRGLDFACDIYIWAPLAGTCGVLLLSLVITLYCKRGRKKLLYIFKQPFMRPVQTTQEEDGCSCRFPEEEEGGCELRVKFSRSADAPAYQQGQNQLYNELNLGRREEYDVLDKRRGRDPEMGGKPRRKNPQEGLYNELQKDKMAEAYSEIGMKGERRRGKGHDGLYQGLSTATKDTYDALHMQALPPR

SEQ ID NO: 1012 - protein, 743 aa, Artificial Sequence
  source: /note="Description of Artificial Sequence: Synthetic polypeptide"
MALPVTALLLPLALLLHAARPDSLALSLTADQMVSALLDAEPPILYSEYDPTRPFSEASMMGLLTNLADRELVHMINWAKRVPGFVDLALHDQVHLLECAWMEILMIGLVWRSMEHPGKLLFAPNLLLDRNQGKCVEGGVEIFDMLLATSSRFRMMNLQGEEFVCLKSIILLNSGVYTFLSSTLKSLEEKDHIHRVLDKITDTLIHLMAKAGLTLQQQHQRLAQLLLILSHIRHMSSKRMEHLYSMKCKNVVPLSDLLLEMLDAHRLGTGAEDPRPSRKRREVQLVESGGGLVQPGGSLRLSCAVSGFALSNHGMSWVRRAPGKGLEWVSGIVYSGSTYYAASVKGRFTISRDNSRNTLYLQMNSLRPEDTAIYYCSAHGGESDVWGQGTTVTVSSASGGGGSGGRASGGGGSDIQLTQSPSSLSASVGDRVTITCRASQSISSYLNWYQQKPGKAPKLLIYAASSLQSGVPSRFSGSGSGTDFTLTISSLQPEDFATYYCQQSYSTPYTFGQGTKVEIKTTTPAPRPPTPAPTIASQPLSLRPEACRPAAGGAVHTRGLDFACDIYIWAPLAGTCGVLLLSLVITLYCKRGRKKLLYIFKQPFMRPVQTTQEEDGCSCRFPEEEEGGCELRVKFSRSADAPAYQQGQNQLYNELNLGRREEYDVLDKRRGRDPEMGGKPRRKNPQEGLYNELQKDKMAEAYSEIGMKGERRRGKGHDGLYQGLSTATKDTYDALHMQALPPR

SEQ ID NO: 1013 - protein, 743 aa, Artificial Sequence
  source: /note="Description of Artificial Sequence: Synthetic polypeptide"
MALPVTALLLPLALLLHAARPDSLALSLTADQMVSALLDAEPPILYSEYDPTRPFSEASMMGLLTNLADRELVHMINWAKRVPGFVDLTLHDQVHLLECAWMEILMIGLVWRSMEHPGKLLFAPNLLLDRNQGKCVEGGVEIFDMLLATSSRFRMMNLQGEEFVCLKSIILLNSGVYTFLSSTLKSLEEKDHIHRVLDKITDTLIHLMAKAGLTLQQQHQRLAQLLLILSHIRHMSNKRMEHLYSMKCKNVVPLSDLLLEMLDAHRLGTGAEDPRPSRKRREVQLVESGGGLVQPGGSLRLSCAVSGFALSNHGMSWVRRAPGKGLEWVSGIVYSGSTYYAASVKGRFTISRDNSRNTLYLQMNSLRPEDTAIYYCSAHGGESDVWGQGTTVTVSSASGGGGSGGRASGGGGSDIQLTQSPSSLSASVGDRVTITCRASQSISSYLNWYQQKPGKAPKLLIYAASSLQSGVPSRFSGSGSGTDFTLTISSLQPEDFATYYCQQSYSTPYTFGQGTKVEIKTTTPAPRPPTPAPTIASQPLSLRPEACRPAAGGAVHTRGLDFACDIYIWAPLAGTCGVLLLSLVITLYCKRGRKKLLYIFKQPFMRPVQTTQEEDGCSCRFPEEEEGGCELRVKFSRSADAPAYQQGQNQLYNELNLGRREEYDVLDKRRGRDPEMGGKPRRKNPQEGLYNELQKDKMAEAYSEIGMKGERRRGKGHDGLYQGLSTATKDTYDALHMQALPPR

SEQ ID NO: 1014 - protein, 752 aa, Artificial Sequence
  source: /note="Description of Artificial Sequence: Synthetic polypeptide"
MALPVTALLLPLALLLHAARPNSLALSLTADQMVSALLDAEPPILYSEYDPTRPFSEASMMGLLTNLADRELVHMINWAKRVPGFVDLALHDQVHLLECAWMEILMIGLVWRSMEHPGKLLFAPNLLLDRNQGKCVEGGVEIFDMLLATSSRFRMMNLQGEEFVCLKSIILLNSGVYTFLSSTLKSLEEKDHIHRVLDKITDTLIHLMAKAGLTLQQQHQRLAQLLLILSHIRHMSSKRMEHLYSMKCKNVVPLSDLLLEMLDAHRLGTGAEDPRPSRKRRSLGDVGEIVMTQSPATLSLSPGERATLSCRASQDISKYLNWYQQKPGQAPRLLIYHTSRLHSGIPARFSGSGSGTDYTLTISSLQPEDFAVYFCQQGNTLPYTFGQGTKLEIKGGGGSGGGGSGGGGSQVQLQESGPGLVKPSETLSLTCTVSGVSLPDYGVSWIRQPPGKGLEWIGVIWGSETTYYSSSLKSRVTISKDNSKNQVSLKLSSVTAADTAVYYCAKHYYYGGSYAMDYWGQGTLVTVSSTTTPAPRPPTPAPTIASQPLSLRPEACRPAAGGAVHTRGLDFACDIYIWAPLAGTCGVLLLSLVITLYCKRGRKKLLYIFKQPFMRPVQTTQEEDGCSCRFPEEEEGGCELRVKFSRSADAPAYQQGQNQLYNELNLGRREEYDVLDKRRGRDPEMGGKPRRKNPQEGLYNELQKDKMAEAYSEIGMKGERRRGKGHDGLYQGLSTATKDTYDALHMQALPPR

SEQ ID NO: 1015 - protein, 752 aa, Artificial Sequence
  source: /note="Description of Artificial Sequence: Synthetic polypeptide"
MALPVTALLLPLALLLHAARPNSLALSLTADQMVSALLDAEPPILYSEYDPTRPFSEASMMGLLTNLADRELVHMINWAKRVPGFVDLTLHDQVHLLECAWMEILMIGLVWRSMEHPGKLLFAPNLLLDRNQGKCVEGGVEIFDMLLATSSRFRMMNLQGEEFVCLKSIILLNSGVYTFLSSTLKSLEEKDHIHRVLDKITDTLIHLMAKAGLTLQQQHQRLAQLLLILSHIRHMSNKRMEHLYSMKCKNVVPLSDLLLEMLDAHRLGTGAEDPRPSRKRRSLGDVGEIVMTQSPATLSLSPGERATLSCRASQDISKYLNWYQQKPGQAPRLLIYHTSRLHSGIPARFSGSGSGTDYTLTISSLQPEDFAVYFCQQGNTLPYTFGQGTKLEIKGGGGSGGGGSGGGGSQVQLQESGPGLVKPSETLSLTCTVSGVSLPDYGVSWIRQPPGKGLEWIGVIWGSETTYYSSSLKSRVTISKDNSKNQVSLKLSSVTAADTAVYYCAKHYYYGGSYAMDYWGQGTLVTVSSTTTPAPRPPTPAPTIASQPLSLRPEACRPAAGGAVHTRGLDFACDIYIWAPLAGTCGVLLLSLVITLYCKRGRKKLLYIFKQPFMRPVQTTQEEDGCSCRFPEEEEGGCELRVKFSRSADAPAYQQGQNQLYNELNLGRREEYDVLDKRRGRDPEMGGKPRRKNPQEGLYNELQKDKMAEAYSEIGMKGERRRGKGHDGLYQGLSTATKDTYDALHMQALPPR

SEQ ID NO: 1016 - protein, 746 aa, Artificial Sequence
  source: /note="Description of Artificial Sequence: Synthetic polypeptide"
MALPVTALLLPLALLLHAARPNSLALSLTADQMVSALLDAEPPILYSEYDPTRPFSEASMMGLLTNLADRELVHMINWAKRVPGFVDLALHDQVHLLECAWMEILMIGLVWRSMEHPGKLLFAPNLLLDRNQGKCVEGGVEIFDMLLATSSRFRMMNLQGEEFVCLKSIILLNSGVYTFLSSTLKSLEEKDHIHRVLDKITDTLIHLMAKAGLTLQQQHQRLAQLLLILSHIRHMSSKRMEHLYSMKCKNVVPLSDLLLEMLDAHRLGTGAEDPRPSRKRREIVMTQSPATLSLSPGERATLSCRASQDISKYLNWYQQKPGQAPRLLIYHTSRLHSGIPARFSGSGSGTDYTLTISSLQPEDFAVYFCQQGNTLPYTFGQGTKLEIKGGGGSGGGGSGGGGSQVQLQESGPGLVKPSETLSLTCTVSGVSLPDYGVSWIRQPPGKGLEWIGVIWGSETTYYSSSLKSRVTISKDNSKNQVSLKLSSVTAADTAVYYCAKHYYYGGSYAMDYWGQGTLVTVSSTTTPAPRPPTPAPTIASQPLSLRPEACRPAAGGAVHTRGLDFACDIYIWAPLAGTCGVLLLSLVITLYCKRGRKKLLYIFKQPFMRPVQTTQEEDGCSCRFPEEEEGGCELRVKFSRSADAPAYQQGQNQLYNELNLGRREEYDVLDKRRGRDPEMGGKPRRKNPQEGLYNELQKDKMAEAYSEIGMKGERRRGKGHDGLYQGLSTATKDTYDALHMQALPPR

SEQ ID NO: 1017 - protein, 746 aa, Artificial Sequence
  source: /note="Description of Artificial Sequence: Synthetic polypeptide"
MALPVTALLLPLALLLHAARPNSLALSLTADQMVSALLDAEPPILYSEYDPTRPFSEASMMGLLTNLADRELVHMINWAKRVPGFVDLTLHDQVHLLECAWMEILMIGLVWRSMEHPGKLLFAPNLLLDRNQGKCVEGGVEIFDMLLATSSRFRMMNLQGEEFVCLKSIILLNSGVYTFLSSTLKSLEEKDHIHRVLDKITDTLIHLMAKAGLTLQQQHQRLAQLLLILSHIRHMSNKRMEHLYSMKCKNVVPLSDLLLEMLDAHRLGTGAEDPRPSRKRREIVMTQSPATLSLSPGERATLSCRASQDISKYLNWYQQKPGQAPRLLIYHTSRLHSGIPARFSGSGSGTDYTLTISSLQPEDFAVYFCQQGNTLPYTFGQGTKLEIKGGGGSGGGGSGGGGSQVQLQESGPGLVKPSETLSLTCTVSGVSLPDYGVSWIRQPPGKGLEWIGVIWGSETTYYSSSLKSRVTISKDNSKNQVSLKLSSVTAADTAVYYCAKHYYYGGSYAMDYWGQGTLVTVSSTTTPAPRPPTPAPTIASQPLSLRPEACRPAAGGAVHTRGLDFACDIYIWAPLAGTCGVLLLSLVITLYCKRGRKKLLYIFKQPFMRPVQTTQEEDGCSCRFPEEEEGGCELRVKFSRSADAPAYQQGQNQLYNELNLGRREEYDVLDKRRGRDPEMGGKPRRKNPQEGLYNELQKDKMAEAYSEIGMKGERRRGKGHDGLYQGLSTATKDTYDALHMQALPPR

SEQ ID NO: 1018 - protein, 753 aa, Artificial Sequence
  source: /note="Description of Artificial Sequence: Synthetic polypeptide"
MALPVTALLLPLALLLHAARPNSLALSLTADQMVSALLDAEPPILYSEYDPTRPFSEASMMGLLTNLADRELVHMINWAKRVPGFVDLALHDQVHLLECAWMEILMIGLVWRSMEHPGKLLFAPNLLLDRNQGKCVEGGVEIFDMLLATSSRFRMMNLQGEEFVCLKSIILLNSGVYTFLSSTLKSLEEKDHIHRVLDKITDTLIHLMAKAGLTLQQQHQRLAQLLLILSHIRHMSSKRMEHLYSMKCKNVVPLSDLLLEMLDAHRLGTGAEDPRPSRKRRSLGDVGQVQLVQSGAEVKKPGASVKVSCKASGYTFTGYYMHWVRQAPGQGLEWMGWINPNSGGTNYAQKFQGRVTLTRDTSISTVYMELSRLRSDDTAVYYCARDMNILATVPFDIWGQGTMVTVSSGGGGSGGGGSGGGGSDIQMTQSPSSLSASVGDRVTITCRASQSISSYLNWYQQKPGKAPKLLIYAASSLQSGVPSRFSGSGSGTDFTLTVNSLQPEDFATYYCQQGDSVPLTFGGGTRLEIKTTTPAPRPPTPAPTIASQPLSLRPEACRPAAGGAVHTRGLDFACDIYIWAPLAGTCGVLLLSLVITLYCKRGRKKLLYIFKQPFMRPVQTTQEEDGCSCRFPEEEEGGCELRVKFSRSADAPAYQQGQNQLYNELNLGRREEYDVLDKRRGRDPEMGGKPRRKNPQEGLYNELQKDKMAEAYSEIGMKGERRRGKGHDGLYQGLSTATKDTYDALHMQALPPR

SEQ ID NO: 1019 - protein, 753 aa, Artificial Sequence
  source: /note="Description of Artificial Sequence: Synthetic polypeptide"
MALPVTALLLPLALLLHAARPNSLALSLTADQMVSALLDAEPPILYSEYDPTRPFSEASMMGLLTNLADRELVHMINWAKRVPGFVDLTLHDQVHLLECAWMEILMIGLVWRSMEHPGKLLFAPNLLLDRNQGKCVEGGVEIFDMLLATSSRFRMMNLQGEEFVCLKSIILLNSGVYTFLSSTLKSLEEKDHIHRVLDKITDTLIHLMAKAGLTLQQQHQRLAQLLLILSHIRHMSNKRMEHLYSMKCKNVVPLSDLLLEMLDAHRLGTGAEDPRPSRKRRSLGDVGQVQLVQSGAEVKKPGASVKVSCKASGYTFTGYYMHWVRQAPGQGLEWMGWINPNSGGTNYAQKFQGRVTLTRDTSISTVYMELSRLRSDDTAVYYCARDMNILATVPFDIWGQGTMVTVSSGGGGSGGGGSGGGGSDIQMTQSPSSLSASVGDRVTITCRASQSISSYLNWYQQKPGKAPKLLIYAASSLQSGVPSRFSGSGSGTDFTLTVNSLQPEDFATYYCQQGDSVPLTFGGGTRLEIKTTTPAPRPPTPAPTIASQPLSLRPEACRPAAGGAVHTRGLDFACDIYIWAPLAGTCGVLLLSLVITLYCKRGRKKLLYIFKQPFMRPVQTTQEEDGCSCRFPEEEEGGCELRVKFSRSADAPAYQQGQNQLYNELNLGRREEYDVLDKRRGRDPEMGGKPRRKNPQEGLYNELQKDKMAEAYSEIGMKGERRRGKGHDGLYQGLSTATKDTYDALHMQALPPR

SEQ ID NO: 1020 - protein, 747 aa, Artificial Sequence
  source: /note="Description of Artificial Sequence: Synthetic polypeptide"
MALPVTALLLPLALLLHAARPNSLALSLTADQMVSALLDAEPPILYSEYDPTRPFSEASMMGLLTNLADRELVHMINWAKRVPGFVDLALHDQVHLLECAWMEILMIGLVWRSMEHPGKLLFAPNLLLDRNQGKCVEGGVEIFDMLLATSSRFRMMNLQGEEFVCLKSIILLNSGVYTFLSSTLKSLEEKDHIHRVLDKITDTLIHLMAKAGLTLQQQHQRLAQLLLILSHIRHMSSKRMEHLYSMKCKNVVPLSDLLLEMLDAHRLGTGAEDPRPSRKRRQVQLVQSGAEVKKPGASVKVSCKASGYTFTGYYMHWVRQAPGQGLEWMGWINPNSGGTNYAQKFQGRVTLTRDTSISTVYMELSRLRSDDTAVYYCARDMNILATVPFDIWGQGTMVTVSSGGGGSGGGGSGGGGSDIQMTQSPSSLSASVGDRVTITCRASQSISSYLNWYQQKPGKAPKLLIYAASSLQSGVPSRFSGSGSGTDFTLTVNSLQPEDFATYYCQQGDSVPLTFGGGTRLEIKTTTPAPRPPTPAPTIASQPLSLRPEACRPAAGGAVHTRGLDFACDIYIWAPLAGTCGVLLLSLVITLYCKRGRKKLLYIFKQPFMRPVQTTQEEDGCSCRFPEEEEGGCELRVKFSRSADAPAYQQGQNQLYNELNLGRREEYDVLDKRRGRDPEMGGKPRRKNPQEGLYNELQKDKMAEAYSEIGMKGERRRGKGHDGLYQGLSTATKDTYDALHMQALPPR

SEQ ID NO: 1021 - protein, 747 aa, Artificial Sequence
  source: /note="Description of Artificial Sequence: Synthetic polypeptide"
MALPVTALLLPLALLLHAARPNSLALSLTADQMVSALLDAEPPILYSEYDPTRPFSEASMMGLLTNLADRELVHMINWAKRVPGFVDLTLHDQVHLLECAWMEILMIGLVWRSMEHPGKLLFAPNLLLDRNQGKCVEGGVEIFDMLLATSSRFRMMNLQGEEFVCLKSIILLNSGVYTFLSSTLKSLEEKDHIHRVLDKITDTLIHLMAKAGLTLQQQHQRLAQLLLILSHIRHMSNKRMEHLYSMKCKNVVPLSDLLLEMLDAHRLGTGAEDPRPSRKRRQVQLVQSGAEVKKPGASVKVSCKASGYTFTGYYMHWVRQAPGQGLEWMGWINPNSGGTNYAQKFQGRVTLTRDTSISTVYMELSRLRSDDTAVYYCARDMNILATVPFDIWGQGTMVTVSSGGGGSGGGGSGGGGSDIQMTQSPSSLSASVGDRVTITCRASQSISSYLNWYQQKPGKAPKLLIYAASSLQSGVPSRFSGSGSGTDFTLTVNSLQPEDFATYYCQQGDSVPLTFGGGTRLEIKTTTPAPRPPTPAPTIASQPLSLRPEACRPAAGGAVHTRGLDFACDIYIWAPLAGTCGVLLLSLVITLYCKRGRKKLLYIFKQPFMRPVQTTQEEDGCSCRFPEEEEGGCELRVKFSRSADAPAYQQGQNQLYNELNLGRREEYDVLDKRRGRDPEMGGKPRRKNPQEGLYNELQKDKMAEAYSEIGMKGERRRGKGHDGLYQGLSTATKDTYDALHMQALPPR

SEQ ID NO: 1022 - protein, 749 aa, Artificial Sequence
  source: /note="Description of Artificial Sequence: Synthetic polypeptide"
MALPVTALLLPLALLLHAARPNSLALSLTADQMVSALLDAEPPILYSEYDPTRPFSEASMMGLLTNLADRELVHMINWAKRVPGFVDLALHDQVHLLECAWMEILMIGLVWRSMEHPGKLLFAPNLLLDRNQGKCVEGGVEIFDMLLATSSRFRMMNLQGEEFVCLKSIILLNSGVYTFLSSTLKSLEEKDHIHRVLDKITDTLIHLMAKAGLTLQQQHQRLAQLLLILSHIRHMSSKRMEHLYSMKCKNVVPLSDLLLEMLDAHRLGTGAEDPRPSRKRRSLGDVGEVQLVESGGGLVQPGGSLRLSCAVSGFALSNHGMSWVRRAPGKGLEWVSGIVYSGSTYYAASVKGRFTISRDNSRNTLYLQMNSLRPEDTAIYYCSAHGGESDVWGQGTTVTVSSASGGGGSGGRASGGGGSDIQLTQSPSSLSASVGDRVTITCRASQSISSYLNWYQQKPGKAPKLLIYAASSLQSGVPSRFSGSGSGTDFTLTISSLQPEDFATYYCQQSYSTPYTFGQGTKVEIKTTTPAPRPPTPAPTIASQPLSLRPEACRPAAGGAVHTRGLDFACDIYIWAPLAGTCGVLLLSLVITLYCKRGRKKLLYIFKQPFMRPVQTTQEEDGCSCRFPEEEEGGCELRVKFSRSADAPAYQQGQNQLYNELNLGRREEYDVLDKRRGRDPEMGGKPRRKNPQEGLYNELQKDKMAEAYSEIGMKGERRRGKGHDGLYQGLSTATKDTYDALHMQALPPR

SEQ ID NO: 1023 - protein, 749 aa, Artificial Sequence
  source: /note="Description of Artificial Sequence: Synthetic polypeptide"
MALPVTALLLPLALLLHAARPNSLALSLTADQMVSALLDAEPPILYSEYDPTRPFSEASMMGLLTNLADRELVHMINWAKRVPGFVDLTLHDQVHLLECAWMEILMIGLVWRSMEHPGKLLFAPNLLLDRNQGKCVEGGVEIFDMLLATSSRFRMMNLQGEEFVCLKSIILLNSGVYTFLSSTLKSLEEKDHIHRVLDKITDTLIHLMAKAGLTLQQQHQRLAQLLLILSHIRHMSNKRMEHLYSMKCKNVVPLSDLLLEMLDAHRLGTGAEDPRPSRKRRSLGDVGEVQLVESGGGLVQPGGSLRLSCAVSGFALSNHGMSWVRRAPGKGLEWVSGIVYSGSTYYAASVKGRFTISRDNSRNTLYLQMNSLRPEDTAIYYCSAHGGESDVWGQGTTVTVSSASGGGGSGGRASGGGGSDIQLTQSPSSLSASVGDRVTITCRASQSISSYLNWYQQKPGKAPKLLIYAASSLQSGVPSRFSGSGSGTDFTLTISSLQPEDFATYYCQQSYSTPYTFGQGTKVEIKTTTPAPRPPTPAPTIASQPLSLRPEACRPAAGGAVHTRGLDFACDIYIWAPLAGTCGVLLLSLVITLYCKRGRKKLLYIFKQPFMRPVQTTQEEDGCSCRFPEEEEGGCELRVKFSRSADAPAYQQGQNQLYNELNLGRREEYDVLDKRRGRDPEMGGKPRRKNPQEGLYNELQKDKMAEAYSEIGMKGERRRGKGHDGLYQGLSTATKDTYDALHMQALPPR

SEQ ID NO: 1024 - protein, 743 aa, Artificial Sequence
  source: /note="Description of Artificial Sequence: Synthetic polypeptide"
MALPVTALLLPLALLLHAARPNSLALSLTADQMVSALLDAEPPILYSEYDPTRPFSEASMMGLLTNLADRELVHMINWAKRVPGFVDLALHDQVHLLECAWMEILMIGLVWRSMEHPGKLLFAPNLLLDRNQGKCVEGGVEIFDMLLATSSRFRMMNLQGEEFVCLKSIILLNSGVYTFLSSTLKSLEEKDHIHRVLDKITDTLIHLMAKAGLTLQQQHQRLAQLLLILSHIRHMSSKRMEHLYSMKCKNVVPLSDLLLEMLDAHRLGTGAEDPRPSRKRREVQLVESGGGLVQPGGSLRLSCAVSGFALSNHGMSWVRRAPGKGLEWVSGIVYSGSTYYAASVKGRFTISRDNSRNTLYLQMNSLRPEDTAIYYCSAHGGESDVWGQGTTVTVSSASGGGGSGGRASGGGGSDIQLTQSPSSLSASVGDRVTITCRASQSISSYLNWYQQKPGKAPKLLIYAASSLQSGVPSRFSGSGSGTDFTLTISSLQPEDFATYYCQQSYSTPYTFGQGTKVEIKTTTPAPRPPTPAPTIASQPLSLRPEACRPAAGGAVHTRGLDFACDIYIWAPLAGTCGVLLLSLVITLYCKRGRKKLLYIFKQPFMRPVQTTQEEDGCSCRFPEEEEGGCELRVKFSRSADAPAYQQGQNQLYNELNLGRREEYDVLDKRRGRDPEMGGKPRRKNPQEGLYNELQKDKMAEAYSEIGMKGERRRGKGHDGLYQGLSTATKDTYDALHMQALPPR

SEQ ID NO: 1025 - protein, 743 aa, Artificial Sequence
  source: /note="Description of Artificial Sequence: Synthetic polypeptide"
MALPVTALLLPLALLLHAARPNSLALSLTADQMVSALLDAEPPILYSEYDPTRPFSEASMMGLLTNLADRELVHMINWAKRVPGFVDLTLHDQVHLLECAWMEILMIGLVWRSMEHPGKLLFAPNLLLDRNQGKCVEGGVEIFDMLLATSSRFRMMNLQGEEFVCLKSIILLNSGVYTFLSSTLKSLEEKDHIHRVLDKITDTLIHLMAKAGLTLQQQHQRLAQLLLILSHIRHMSNKRMEHLYSMKCKNVVPLSDLLLEMLDAHRLGTGAEDPRPSRKRREVQLVESGGGLVQPGGSLRLSCAVSGFALSNHGMSWVRRAPGKGLEWVSGIVYSGSTYYAASVKGRFTISRDNSRNTLYLQMNSLRPEDTAIYYCSAHGGESDVWGQGTTVTVSSASGGGGSGGRASGGGGSDIQLTQSPSSLSASVGDRVTITCRASQSISSYLNWYQQKPGKAPKLLIYAASSLQSGVPSRFSGSGSGTDFTLTISSLQPEDFATYYCQQSYSTPYTFGQGTKVEIKTTTPAPRPPTPAPTIASQPLSLRPEACRPAAGGAVHTRGLDFACDIYIWAPLAGTCGVLLLSLVITLYCKRGRKKLLYIFKQPFMRPVQTTQEEDGCSCRFPEEEEGGCELRVKFSRSADAPAYQQGQNQLYNELNLGRREEYDVLDKRRGRDPEMGGKPRRKNPQEGLYNELQKDKMAEAYSEIGMKGERRRGKGHDGLYQGLSTATKDTYDALHMQALPPR

SEQ ID NO: 1026 - protein, 752 aa, Artificial Sequence
  source: /note="Description of Artificial Sequence: Synthetic polypeptide"
MALPVTALLLPLALLLHAARPESLALSLTADQMVSALLDAEPPILYSEYDPTRPFSEASMMGLLTNLADRELVHMINWAKRVPGFVDLALHDQVHLLECAWMEILMIGLVWRSMEHPGKLLFAPNLLLDRNQGKCVEGGVEIFDMLLATSSRFRMMNLQGEEFVCLKSIILLNSGVYTFLSSTLKSLEEKDHIHRVLDKITDTLIHLMAKAGLTLQQQHQRLAQLLLILSHIRHMSSKRMEHLYSMKCKNVVPLSDLLLEMLDAHRLGTGAEDPRPSRKRRSLGDVGEIVMTQSPATLSLSPGERATLSCRASQDISKYLNWYQQKPGQAPRLLIYHTSRLHSGIPARFSGSGSGTDYTLTISSLQPEDFAVYFCQQGNTLPYTFGQGTKLEIKGGGGSGGGGSGGGGSQVQLQESGPGLVKPSETLSLTCTVSGVSLPDYGVSWIRQPPGKGLEWIGVIWGSETTYYSSSLKSRVTISKDNSKNQVSLKLSSVTAADTAVYYCAKHYYYGGSYAMDYWGQGTLVTVSSTTTPAPRPPTPAPTIASQPLSLRPEACRPAAGGAVHTRGLDFACDIYIWAPLAGTCGVLLLSLVITLYCKRGRKKLLYIFKQPFMRPVQTTQEEDGCSCRFPEEEEGGCELRVKFSRSADAPAYQQGQNQLYNELNLGRREEYDVLDKRRGRDPEMGGKPRRKNPQEGLYNELQKDKMAEAYSEIGMKGERRRGKGHDGLYQGLSTATKDTYDALHMQALPPR

SEQ ID NO: 1027 - protein, 752 aa, Artificial Sequence
  source: /note="Description of Artificial Sequence: Synthetic polypeptide"
MALPVTALLLPLALLLHAARPESLALSLTADQMVSALLDAEPPILYSEYDPTRPFSEASMMGLLTNLADRELVHMINWAKRVPGFVDLTLHDQVHLLECAWMEILMIGLVWRSMEHPGKLLFAPNLLLDRNQGKCVEGGVEIFDMLLATSSRFRMMNLQGEEFVCLKSIILLNSGVYTFLSSTLKSLEEKDHIHRVLDKITDTLIHLMAKAGLTLQQQHQRLAQLLLILSHIRHMSNKRMEHLYSMKCKNVVPLSDLLLEMLDAHRLGTGAEDPRPSRKRRSLGDVGEIVMTQSPATLSLSPGERATLSCRASQDISKYLNWYQQKPGQAPRLLIYHTSRLHSGIPARFSGSGSGTDYTLTISSLQPEDFAVYFCQQGNTLPYTFGQGTKLEIKGGGGSGGGGSGGGGSQVQLQESGPGLVKPSETLSLTCTVSGVSLPDYGVSWIRQPPGKGLEWIGVIWGSETTYYSSSLKSRVTISKDNSKNQVSLKLSSVTAADTAVYYCAKHYYYGGSYAMDYWGQGTLVTVSSTTTPAPRPPTPAPTIASQPLSLRPEACRPAAGGAVHTRGLDFACDIYIWAPLAGTCGVLLLSLVITLYCKRGRKKLLYIFKQPFMRPVQTTQEEDGCSCRFPEEEEGGCELRVKFSRSADAPAYQQGQNQLYNELNLGRREEYDVLDKRRGRDPEMGGKPRRKNPQEGLYNELQKDKMAEAYSEIGMKGERRRGKGHDGLYQGLSTATKDTYDALHMQALPPR

SEQ ID NO: 1028 - protein, 746 aa, Artificial Sequence
  source: /note="Description of Artificial Sequence: Synthetic polypeptide"
MALPVTALLLPLALLLHAARPESLALSLTADQMVSALLDAEPPILYSEYDPTRPFSEASMMGLLTNLADRELVHMINWAKRVPGFVDLALHDQVHLLECAWMEILMIGLVWRSMEHPGKLLFAPNLLLDRNQGKCVEGGVEIFDMLLATSSRFRMMNLQGEEFVCLKSIILLNSGVYTFLSSTLKSLEEKDHIHRVLDKITDTLIHLMAKAGLTLQQQHQRLAQLLLILSHIRHMSSKRMEHLYSMKCKNVVPLSDLLLEMLDAHRLGTGAEDPRPSRKRREIVMTQSPATLSLSPGERATLSCRASQDISKYLNWYQQKPGQAPRLLIYHTSRLHSGIPARFSGSGSGTDYTLTISSLQPEDFAVYFCQQGNTLPYTFGQGTKLEIKGGGGSGGGGSGGGGSQVQLQESGPGLVKPSETLSLTCTVSGVSLPDYGVSWIRQPPGKGLEWIGVIWGSETTYYSSSLKSRVTISKDNSKNQVSLKLSSVTAADTAVYYCAKHYYYGGSYAMDYWGQGTLVTVSSTTTPAPRPPTPAPTIASQPLSLRPEACRPAAGGAVHTRGLDFACDIYIWAPLAGTCGVLLLSLVITLYCKRGRKKLLYIFKQPFMRPVQTTQEEDGCSCRFPEEEEGGCELRVKFSRSADAPAYQQGQNQLYNELNLGRREEYDVLDKRRGRDPEMGGKPRRKNPQEGLYNELQKDKMAEAYSEIGMKGERRRGKGHDGLYQGLSTATKDTYDALHMQALPPR

SEQ ID NO: 1029 - protein, 746 aa, Artificial Sequence
  source: /note="Description of Artificial Sequence: Synthetic polypeptide"
MALPVTALLLPLALLLHAARPESLALSLTADQMVSALLDAEPPILYSEYDPTRPFSEASMMGLLTNLADRELVHMINWAKRVPGFVDLTLHDQVHLLECAWMEILMIGLVWRSMEHPGKLLFAPNLLLDRNQGKCVEGGVEIFDMLLATSSRFRMMNLQGEEFVCLKSIILLNSGVYTFLSSTLKSLEEKDHIHRVLDKITDTLIHLMAKAGLTLQQQHQRLAQLLLILSHIRHMSNKRMEHLYSMKCKNVVPLSDLLLEMLDAHRLGTGAEDPRPSRKRREIVMTQSPATLSLSPGERATLSCRASQDISKYLNWYQQKPGQAPRLLIYHTSRLHSGIPARFSGSGSGTDYTLTISSLQPEDFAVYFCQQGNTLPYTFGQGTKLEIKGGGGSGGGGSGGGGSQVQLQESGPGLVKPSETLSLTCTVSGVSLPDYGVSWIRQPPGKGLEWIGVIWGSETTYYSSSLKSRVTISKDNSKNQVSLKLSSVTAADTAVYYCAKHYYYGGSYAMDYWGQGTLVTVSSTTTPAPRPPTPAPTIASQPLSLRPEACRPAAGGAVHTRGLDFACDIYIWAPLAGTCGVLLLSLVITLYCKRGRKKLLYIFKQPFMRPVQTTQEEDGCSCRFPEEEEGGCELRVKFSRSADAPAYQQGQNQLYNELNLGRREEYDVLDKRRGRDPEMGGKPRRKNPQEGLYNELQKDKMAEAYSEIGMKGERRRGKGHDGLYQGLSTATKDTYDALHMQALPPR

SEQ ID NO: 1030 - protein, 753 aa, Artificial Sequence
  source: /note="Description of Artificial Sequence: Synthetic polypeptide"
MALPVTALLLPLALLLHAARPESLALSLTADQMVSALLDAEPPILYSEYDPTRPFSEASMMGLLTNLADRELVHMINWAKRVPGFVDLALHDQVHLLECAWMEILMIGLVWRSMEHPGKLLFAPNLLLDRNQGKCVEGGVEIFDMLLATSSRFRMMNLQGEEFVCLKSIILLNSGVYTFLSSTLKSLEEKDHIHRVLDKITDTLIHLMAKAGLTLQQQHQRLAQLLLILSHIRHMSSKRMEHLYSMKCKNVVPLSDLLLEMLDAHRLGTGAEDPRPSRKRRSLGDVGQVQLVQSGAEVKKPGASVKVSCKASGYTFTGYYMHWVRQAPGQGLEWMGWINPNSGGTNYAQKFQGRVTLTRDTSISTVYMELSRLRSDDTAVYYCARDMNILATVPFDIWGQGTMVTVSSGGGGSGGGGSGGGGSDIQMTQSPSSLSASVGDRVTITCRASQSISSYLNWYQQKPGKAPKLLIYAASSLQSGVPSRFSGSGSGTDFTLTVNSLQPEDFATYYCQQGDSVPLTFGGGTRLEIKTTTPAPRPPTPAPTIASQPLSLRPEACRPAAGGAVHTRGLDFACDIYIWAPLAGTCGVLLLSLVITLYCKRGRKKLLYIFKQPFMRPVQTTQEEDGCSCRFPEEEEGGCELRVKFSRSADAPAYQQGQNQLYNELNLGRREEYDVLDKRRGRDPEMGGKPRRKNPQEGLYNELQKDKMAEAYSEIGMKGERRRGKGHDGLYQGLSTATKDTYDALHMQALPPR

SEQ ID NO: 1031 - protein, 753 aa, Artificial Sequence
  source: /note="Description of Artificial Sequence: Synthetic polypeptide"
MALPVTALLLPLALLLHAARPESLALSLTADQMVSALLDAEPPILYSEYDPTRPFSEASMMGLLTNLADRELVHMINWAKRVPGFVDLTLHDQVHLLECAWMEILMIGLVWRSMEHPGKLLFAPNLLLDRNQGKCVEGGVEIFDMLLATSSRFRMMNLQGEEFVCLKSIILLNSGVYTFLSSTLKSLEEKDHIHRVLDKITDTLIHLMAKAGLTLQQQHQRLAQLLLILSHIRHMSNKRMEHLYSMKCKNVVPLSDLLLEMLDAHRLGTGAEDPRPSRKRRSLGDVGQVQLVQSGAEVKKPGASVKVSCKASGYTFTGYYMHWVRQAPGQGLEWMGWINPNSGGTNYAQKFQGRVTLTRDTSISTVYMELSRLRSDDTAVYYCARDMNILATVPFDIWGQGTMVTVSSGGGGSGGGGSGGGGSDIQMTQSPSSLSASVGDRVTITCRASQSISSYLNWYQQKPGKAPKLLIYAASSLQSGVPSRFSGSGSGTDFTLTVNSLQPEDFATYYCQQGDSVPLTFGGGTRLEIKTTTPAPRPPTPAPTIASQPLSLRPEACRPAAGGAVHTRGLDFACDIYIWAPLAGTCGVLLLSLVITLYCKRGRKKLLYIFKQPFMRPVQTTQEEDGCSCRFPEEEEGGCELRVKFSRSADAPAYQQGQNQLYNELNLGRREEYDVLDKRRGRDPEMGGKPRRKNPQEGLYNELQKDKMAEAYSEIGMKGERRRGKGHDGLYQGLSTATKDTYDALHMQALPPR

SEQ ID NO: 1032 - protein, 747 aa, Artificial Sequence
  source: /note="Description of Artificial Sequence: Synthetic polypeptide"
MALPVTALLLPLALLLHAARPESLALSLTADQMVSALLDAEPPILYSEYDPTRPFSEASMMGLLTNLADRELVHMINWAKRVPGFVDLALHDQVHLLECAWMEILMIGLVWRSMEHPGKLLFAPNLLLDRNQGKCVEGGVEIFDMLLATSSRFRMMNLQGEEFVCLKSIILLNSGVYTFLSSTLKSLEEKDHIHRVLDKITDTLIHLMAKAGLTLQQQHQRLAQLLLILSHIRHMSSKRMEHLYSMKCKNVVPLSDLLLEMLDAHRLGTGAEDPRPSRKRRQVQLVQSGAEVKKPGASVKVSCKASGYTFTGYYMHWVRQAPGQGLEWMGWINPNSGGTNYAQKFQGRVTLTRDTSISTVYMELSRLRSDDTAVYYCARDMNILATVPFDIWGQGTMVTVSSGGGGSGGGGSGGGGSDIQMTQSPSSLSASVGDRVTITCRASQSISSYLNWYQQKPGKAPKLLIYAASSLQSGVPSRFSGSGSGTDFTLTVNSLQPEDFATYYCQQGDSVPLTFGGGTRLEIKTTTPAPRPPTPAPTIASQPLSLRPEACRPAAGGAVHTRGLDFACDIYIWAPLAGTCGVLLLSLVITLYCKRGRKKLLYIFKQPFMRPVQTTQEEDGCSCRFPEEEEGGCELRVKFSRSADAPAYQQGQNQLYNELNLGRREEYDVLDKRRGRDPEMGGKPRRKNPQEGLYNELQKDKMAEAYSEIGMKGERRRGKGHDGLYQGLSTATKDTYDALHMQALPPR

SEQ ID NO: 1033 - protein, 747 aa, Artificial Sequence
  source: /note="Description of Artificial Sequence: Synthetic polypeptide"
MALPVTALLLPLALLLHAARPESLALSLTADQMVSALLDAEPPILYSEYDPTRPFSEASMMGLLTNLADRELVHMINWAKRVPGFVDLTLHDQVHLLECAWMEILMIGLVWRSMEHPGKLLFAPNLLLDRNQGKCVEGGVEIFDMLLATSSRFRMMNLQGEEFVCLKSIILLNSGVYTFLSSTLKSLEEKDHIHRVLDKITDTLIHLMAKAGLTLQQQHQRLAQLLLILSHIRHMSNKRMEHLYSMKCKNVVPLSDLLLEMLDAHRLGTGAEDPRPSRKRRQVQLVQSGAEVKKPGASVKVSCKASGYTFTGYYMHWVRQAPGQGLEWMGWINPNSGGTNYAQKFQGRVTLTRDTSISTVYMELSRLRSDDTAVYYCARDMNILATVPFDIWGQGTMVTVSSGGGGSGGGGSGGGGSDIQMTQSPSSLSASVGDRVTITCRASQSISSYLNWYQQKPGKAPKLLIYAASSLQSGVPSRFSGSGSGTDFTLTVNSLQPEDFATYYCQQGDSVPLTFGGGTRLEIKTTTPAPRPPTPAPTIASQPLSLRPEACRPAAGGAVHTRGLDFACDIYIWAPLAGTCGVLLLSLVITLYCKRGRKKLLYIFKQPFMRPVQTTQEEDGCSCRFPEEEEGGCELRVKFSRSADAPAYQQGQNQLYNELNLGRREEYDVLDKRRGRDPEMGGKPRRKNPQEGLYNELQKDKMAEAYSEIGMKGERRRGKGHDGLYQGLSTATKDTYDALHMQALPPR

SEQ ID NO: 1034 - protein, 749 aa, Artificial Sequence
  source: /note="Description of Artificial Sequence: Synthetic polypeptide"
MALPVTALLLPLALLLHAARPESLALSLTADQMVSALLDAEPPILYSEYDPTRPFSEASMMGLLTNLADRELVHMINWAKRVPGFVDLALHDQVHLLECAWMEILMIGLVWRSMEHPGKLLFAPNLLLDRNQGKCVEGGVEIFDMLLATSSRFRMMNLQGEEFVCLKSIILLNSGVYTFLSSTLKSLEEKDHIHRVLDKITDTLIHLMAKAGLTLQQQHQRLAQLLLILSHIRHMSSKRMEHLYSMKCKNVVPLSDLLLEMLDAHRLGTGAEDPRPSRKRRSLGDVGEVQLVESGGGLVQPGGSLRLSCAVSGFALSNHGMSWVRRAPGKGLEWVSGIVYSGSTYYAASVKGRFTISRDNSRNTLYLQMNSLRPEDTAIYYCSAHGGESDVWGQGTTVTVSSASGGGGSGGRASGGGGSDIQLTQSPSSLSASVGDRVTITCRASQSISSYLNWYQQKPGKAPKLLIYAASSLQSGVPSRFSGSGSGTDFTLTISSLQPEDFATYYCQQSYSTPYTFGQGTKVEIKTTTPAPRPPTPAPTIASQPLSLRPEACRPAAGGAVHTRGLDFACDIYIWAPLAGTCGVLLLSLVITLYCKRGRKKLLYIFKQPFMRPVQTTQEEDGCSCRFPEEEEGGCELRVKFSRSADAPAYQQGQNQLYNELNLGRREEYDVLDKRRGRDPEMGGKPRRKNPQEGLYNELQKDKMAEAYSEIGMKGERRRGKGHDGLYQGLSTATKDTYDALHMQALPPR

SEQ ID NO: 1035 - protein, 749 aa, Artificial Sequence
  source: /note="Description of Artificial Sequence: Synthetic polypeptide"
MALPVTALLLPLALLLHAARPESLALSLTADQMVSALLDAEPPILYSEYDPTRPFSEASMMGLLTNLADRELVHMINWAKRVPGFVDLTLHDQVHLLECAWMEILMIGLVWRSMEHPGKLLFAPNLLLDRNQGKCVEGGVEIFDMLLATSSRFRMMNLQGEEFVCLKSIILLNSGVYTFLSSTLKSLEEKDHIHRVLDKITDTLIHLMAKAGLTLQQQHQRLAQLLLILSHIRHMSNKRMEHLYSMKCKNVVPLSDLLLEMLDAHRLGTGAEDPRPSRKRRSLGDVGEVQLVESGGGLVQPGGSLRLSCAVSGFALSNHGMSWVRRAPGKGLEWVSGIVYSGSTYYAASVKGRFTISRDNSRNTLYLQMNSLRPEDTAIYYCSAHGGESDVWGQGTTVTVSSASGGGGSGGRASGGGGSDIQLTQSPSSLSASVGDRVTITCRASQSISSYLNWYQQKPGKAPKLLIYAASSLQSGVPSRFSGSGSGTDFTLTISSLQPEDFATYYCQQSYSTPYTFGQGTKVEIKTTTPAPRPPTPAPTIASQPLSLRPEACRPAAGGAVHTRGLDFACDIYIWAPLAGTCGVLLLSLVITLYCKRGRKKLLYIFKQPFMRPVQTTQEEDGCSCRFPEEEEGGCELRVKFSRSADAPAYQQGQNQLYNELNLGRREEYDVLDKRRGRDPEMGGKPRRKNPQEGLYNELQKDKMAEAYSEIGMKGERRRGKGHDGLYQGLSTATKDTYDALHMQALPPR

SEQ ID NO: 1036 - protein, 743 aa, Artificial Sequence
  source: /note="Description of Artificial Sequence: Synthetic polypeptide"
MALPVTALLLPLALLLHAARPESLALSLTADQMVSALLDAEPPILYSEYDPTRPFSEASMMGLLTNLADRELVHMINWAKRVPGFVDLALHDQVHLLECAWMEILMIGLVWRSMEHPGKLLFAPNLLLDRNQGKCVEGGVEIFDMLLATSSRFRMMNLQGEEFVCLKSIILLNSGVYTFLSSTLKSLEEKDHIHRVLDKITDTLIHLMAKAGLTLQQQHQRLAQLLLILSHIRHMSSKRMEHLYSMKCKNVVPLSDLLLEMLDAHRLGTGAEDPRPSRKRREVQLVESGGGLVQPGGSLRLSCAVSGFALSNHGMSWVRRAPGKGLEWVSGIVYSGSTYYAASVKGRFTISRDNSRNTLYLQMNSLRPEDTAIYYCSAHGGESDVWGQGTTVTVSSASGGGGSGGRASGGGGSDIQLTQSPSSLSASVGDRVTITCRASQSISSYLNWYQQKPGKAPKLLIYAASSLQSGVPSRFSGSGSGTDFTLTISSLQPEDFATYYCQQSYSTPYTFGQGTKVEIKTTTPAPRPPTPAPTIASQPLSLRPEACRPAAGGAVHTRGLDFACDIYIWAPLAGTCGVLLLSLVITLYCKRGRKKLLYIFKQPFMRPVQTTQEEDGCSCRFPEEEEGGCELRVKFSRSADAPAYQQGQNQLYNELNLGRREEYDVLDKRRGRDPEMGGKPRRKNPQEGLYNELQKDKMAEAYSEIGMKGERRRGKGHDGLYQGLSTATKDTYDALHMQALPPR

SEQ ID NO: 1037 - protein, 743 aa, Artificial Sequence
  source: /note="Description of Artificial Sequence: Synthetic polypeptide"
MALPVTALLLPLALLLHAARPESLALSLTADQMVSALLDAEPPILYSEYDPTRPFSEASMMGLLTNLADRELVHMINWAKRVPGFVDLTLHDQVHLLECAWMEILMIGLVWRSMEHPGKLLFAPNLLLDRNQGKCVEGGVEIFDMLLATSSRFRMMNLQGEEFVCLKSIILLNSGVYTFLSSTLKSLEEKDHIHRVLDKITDTLIHLMAKAGLTLQQQHQRLAQLLLILSHIRHMSNKRMEHLYSMKCKNVVPLSDLLLEMLDAHRLGTGAEDPRPSRKRREVQLVESGGGLVQPGGSLRLSCAVSGFALSNHGMSWVRRAPGKGLEWVSGIVYSGSTYYAASVKGRFTISRDNSRNTLYLQMNSLRPEDTAIYYCSAHGGESDVWGQGTTVTVSSASGGGGSGGRASGGGGSDIQLTQSPSSLSASVGDRVTITCRASQSISSYLNWYQQKPGKAPKLLIYAASSLQSGVPSRFSGSGSGTDFTLTISSLQPEDFATYYCQQSYSTPYTFGQGTKVEIKTTTPAPRPPTPAPTIASQPLSLRPEACRPAAGGAVHTRGLDFACDIYIWAPLAGTCGVLLLSLVITLYCKRGRKKLLYIFKQPFMRPVQTTQEEDGCSCRFPEEEEGGCELRVKFSRSADAPAYQQGQNQLYNELNLGRREEYDVLDKRRGRDPEMGGKPRRKNPQEGLYNELQKDKMAEAYSEIGMKGERRRGKGHDGLYQGLSTATKDTYDALHMQALPPR

SEQ ID NO: 1038 - protein, 752 aa, Artificial Sequence
  source: /note="Description of Artificial Sequence: Synthetic polypeptide"
MALPVTALLLPLALLLHAARPQSLALSLTADQMVSALLDAEPPILYSEYDPTRPFSEASMMGLLTNLADRELVHMINWAKRVPGFVDLALHDQVHLLECAWMEILMIGLVWRSMEHPGKLLFAPNLLLDRNQGKCVEGGVEIFDMLLATSSRFRMMNLQGEEFVCLKSIILLNSGVYTFLSSTLKSLEEKDHIHRVLDKITDTLIHLMAKAGLTLQQQHQRLAQLLLILSHIRHMSSKRMEHLYSMKCKNVVPLSDLLLEMLDAHRLGTGAEDPRPSRKRRSLGDVGEIVMTQSPATLSLSPGERATLSCRASQDISKYLNWYQQKPGQAPRLLIYHTSRLHSGIPARFSGSGSGTDYTLTISSLQPEDFAVYFCQQGNTLPYTFGQGTKLEIKGGGGSGGGGSGGGGSQVQLQESGPGLVKPSETLSLTCTVSGVSLPDYGVSWIRQPPGKGLEWIGVIWGSETTYYSSSLKSRVTISKDNSKNQVSLKLSSVTAADTAVYYCAKHYYYGGSYAMDYWGQGTLVTVSSTTTPAPRPPTPAPTIASQPLSLRPEACRPAAGGAVHTRGLDFACDIYIWAPLAGTCGVLLLSLVITLYCKRGRKKLLYIFKQPFMRPVQTTQEEDGCSCRFPEEEEGGCELRVKFSRSADAPAYQQGQNQLYNELNLGRREEYDVLDKRRGRDPEMGGKPRRKNPQEGLYNELQKDKMAEAYSEIGMKGERRRGKGHDGLYQGLSTATKDTYDALHMQALPPR

SEQ ID NO: 1039 - protein, 752 aa, Artificial Sequence
  source: /note="Description of Artificial Sequence: Synthetic polypeptide"
MALPVTALLLPLALLLHAARPQSLALSLTADQMVSALLDAEPPILYSEYDPTRPFSEASMMGLLTNLADRELVHMINWAKRVPGFVDLTLHDQVHLLECAWMEILMIGLVWRSMEHPGKLLFAPNLLLDRNQGKCVEGGVEIFDMLLATSSRFRMMNLQGEEFVCLKSIILLNSGVYTFLSSTLKSLEEKDHIHRVLDKITDTLIHLMAKAGLTLQQQHQRLAQLLLILSHIRHMSNKRMEHLYSMKCKNVVPLSDLLLEMLDAHRLGTGAEDPRPSRKRRSLGDVGEIVMTQSPATLSLSPGERATLSCRASQDISKYLNWYQQKPGQAPRLLIYHTSRLHSGIPARFSGSGSGTDYTLTISSLQPEDFAVYFCQQGNTLPYTFGQGTKLEIKGGGGSGGGGSGGGGSQVQLQESGPGLVKPSETLSLTCTVSGVSLPDYGVSWIRQPPGKGLEWIGVIWGSETTYYSSSLKSRVTISKDNSKNQVSLKLSSVTAADTAVYYCAKHYYYGGSYAMDYWGQGTLVTVSSTTTPAPRPPTPAPTIASQPLSLRPEACRPAAGGAVHTRGLDFACDIYIWAPLAGTCGVLLLSLVITLYCKRGRKKLLYIFKQPFMRPVQTTQEEDGCSCRFPEEEEGGCELRVKFSRSADAPAYQQGQNQLYNELNLGRREEYDVLDKRRGRDPEMGGKPRRKNPQEGLYNELQKDKMAEAYSEIGMKGERRRGKGHDGLYQGLSTATKDTYDALHMQALPPR

SEQ ID NO: 1040 - protein, 746 aa, Artificial Sequence
  source: /note="Description of Artificial Sequence: Synthetic polypeptide"
MALPVTALLLPLALLLHAARPQSLALSLTADQMVSALLDAEPPILYSEYDPTRPFSEASMMGLLTNLADRELVHMINWAKRVPGFVDLALHDQVHLLECAWMEILMIGLVWRSMEHPGKLLFAPNLLLDRNQGKCVEGGVEIFDMLLATSSRFRMMNLQGEEFVCLKSIILLNSGVYTFLSSTLKSLEEKDHIHRVLDKITDTLIHLMAKAGLTLQQQHQRLAQLLLILSHIRHMSSKRMEHLYSMKCKNVVPLSDLLLEMLDAHRLGTGAEDPRPSRKRREIVMTQSPATLSLSPGERATLSCRASQDISKYLNWYQQKPGQAPRLLIYHTSRLHSGIPARFSGSGSGTDYTLTISSLQPEDFAVYFCQQGNTLPYTFGQGTKLEIKGGGGSGGGGSGGGGSQVQLQESGPGLVKPSETLSLTCTVSGVSLPDYGVSWIRQPPGKGLEWIGVIWGSETTYYSSSLKSRVTISKDNSKNQVSLKLSSVTAADTAVYYCAKHYYYGGSYAMDYWGQGTLVTVSSTTTPAPRPPTPAPTIASQPLSLRPEACRPAAGGAVHTRGLDFACDIYIWAPLAGTCGVLLLSLVITLYCKRGRKKLLYIFKQPFMRPVQTTQEEDGCSCRFPEEEEGGCELRVKFSRSADAPAYQQGQNQLYNELNLGRREEYDVLDKRRGRDPEMGGKPRRKNPQEGLYNELQKDKMAEAYSEIGMKGERRRGKGHDGLYQGLSTATKDTYDALHMQALPPR

SEQ ID NO: 1041 - protein, 746 aa, Artificial Sequence
  source: /note="Description of Artificial Sequence: Synthetic polypeptide"
MALPVTALLLPLALLLHAARPQSLALSLTADQMVSALLDAEPPILYSEYDPTRPFSEASMMGLLTNLADRELVHMINWAKRVPGFVDLTLHDQVHLLECAWMEILMIGLVWRSMEHPGKLLFAPNLLLDRNQGKCVEGGVEIFDMLLATSSRFRMMNLQGEEFVCLKSIILLNSGVYTFLSSTLKSLEEKDHIHRVLDKITDTLIHLMAKAGLTLQQQHQRLAQLLLILSHIRHMSNKRMEHLYSMKCKNVVPLSDLLLEMLDAHRLGTGAEDPRPSRKRREIVMTQSPATLSLSPGERATLSCRASQDISKYLNWYQQKPGQAPRLLIYHTSRLHSGIPARFSGSGSGTDYTLTISSLQPEDFAVYFCQQGNTLPYTFGQGTKLEIKGGGGSGGGGSGGGGSQVQLQESGPGLVKPSETLSLTCTVSGVSLPDYGVSWIRQPPGKGLEWIGVIWGSETTYYSSSLKSRVTISKDNSKNQVSLKLSSVTAADTAVYYCAKHYYYGGSYAMDYWGQGTLVTVSSTTTPAPRPPTPAPTIASQPLSLRPEACRPAAGGAVHTRGLDFACDIYIWAPLAGTCGVLLLSLVITLYCKRGRKKLLYIFKQPFMRPVQTTQEEDGCSCRFPEEEEGGCELRVKFSRSADAPAYQQGQNQLYNELNLGRREEYDVLDKRRGRDPEMGGKPRRKNPQEGLYNELQKDKMAEAYSEIGMKGERRRGKGHDGLYQGLSTATKDTYDALHMQALPPR

SEQ ID NO: 1042 - protein, 753 aa, Artificial Sequence
  source: /note="Description of Artificial Sequence: Synthetic polypeptide"
MALPVTALLLPLALLLHAARPQSLALSLTADQMVSALLDAEPPILYSEYDPTRPFSEASMMGLLTNLADRELVHMINWAKRVPGFVDLALHDQVHLLECAWMEILMIGLVWRSMEHPGKLLFAPNLLLDRNQGKCVEGGVEIFDMLLATSSRFRMMNLQGEEFVCLKSIILLNSGVYTFLSSTLKSLEEKDHIHRVLDKITDTLIHLMAKAGLTLQQQHQRLAQLLLILSHIRHMSSKRMEHLYSMKCKNVVPLSDLLLEMLDAHRLGTGAEDPRPSRKRRSLGDVGQVQLVQSGAEVKKPGASVKVSCKASGYTFTGYYMHWVRQAPGQGLEWMGWINPNSGGTNYAQKFQGRVTLTRDTSISTVYMELSRLRSDDTAVYYCARDMNILATVPFDIWGQGTMVTVSSGGGGSGGGGSGGGGSDIQMTQSPSSLSASVGDRVTITCRASQSISSYLNWYQQKPGKAPKLLIYAASSLQSGVPSRFSGSGSGTDFTLTVNSLQPEDFATYYCQQGDSVPLTFGGGTRLEIKTTTPAPRPPTPAPTIASQPLSLRPEACRPAAGGAVHTRGLDFACDIYIWAPLAGTCGVLLLSLVITLYCKRGRKKLLYIFKQPFMRPVQTTQEEDGCSCRFPEEEEGGCELRVKFSRSADAPAYQQGQNQLYNELNLGRREEYDVLDKRRGRDPEMGGKPRRKNPQEGLYNELQKDKMAEAYSEIGMKGERRRGKGHDGLYQGLSTATKDTYDALHMQALPPR

SEQ ID NO: 1043 - protein, 753 aa, Artificial Sequence
  source: /note="Description of Artificial Sequence: Synthetic polypeptide"
MALPVTALLLPLALLLHAARPQSLALSLTADQMVSALLDAEPPILYSEYDPTRPFSEASMMGLLTNLADRELVHMINWAKRVPGFVDLTLHDQVHLLECAWMEILMIGLVWRSMEHPGKLLFAPNLLLDRNQGKCVEGGVEIFDMLLATSSRFRMMNLQGEEFVCLKSIILLNSGVYTFLSSTLKSLEEKDHIHRVLDKITDTLIHLMAKAGLTLQQQHQRLAQLLLILSHIRHMSNKRMEHLYSMKCKNVVPLSDLLLEMLDAHRLGTGAEDPRPSRKRRSLGDVGQVQLVQSGAEVKKPGASVKVSCKASGYTFTGYYMHWVRQAPGQGLEWMGWINPNSGGTNYAQKFQGRVTLTRDTSISTVYMELSRLRSDDTAVYYCARDMNILATVPFDIWGQGTMVTVSSGGGGSGGGGSGGGGSDIQMTQSPSSLSASVGDRVTITCRASQSISSYLNWYQQKPGKAPKLLIYAASSLQSGVPSRFSGSGSGTDFTLTVNSLQPEDFATYYCQQGDSVPLTFGGGTRLEIKTTTPAPRPPTPAPTIASQPLSLRPEACRPAAGGAVHTRGLDFACDIYIWAPLAGTCGVLLLSLVITLYCKRGRKKLLYIFKQPFMRPVQTTQEEDGCSCRFPEEEEGGCELRVKFSRSADAPAYQQGQNQLYNELNLGRREEYDVLDKRRGRDPEMGGKPRRKNPQEGLYNELQKDKMAEAYSEIGMKGERRRGKGHDGLYQGLSTATKDTYDALHMQALPPR

SEQ ID NO: 1044 - protein, 747 aa, Artificial Sequence
  source: /note="Description of Artificial Sequence: Synthetic polypeptide"
MALPVTALLLPLALLLHAARPQSLALSLTADQMVSALLDAEPPILYSEYDPTRPFSEASMMGLLTNLADRELVHMINWAKRVPGFVDLALHDQVHLLECAWMEILMIGLVWRSMEHPGKLLFAPNLLLDRNQGKCVEGGVEIFDMLLATSSRFRMMNLQGEEFVCLKSIILLNSGVYTFLSSTLKSLEEKDHIHRVLDKITDTLIHLMAKAGLTLQQQHQRLAQLLLILSHIRHMSSKRMEHLYSMKCKNVVPLSDLLLEMLDAHRLGTGAEDPRPSRKRRQVQLVQSGAEVKKPGASVKVSCKASGYTFTGYYMHWVRQAPGQGLEWMGWINPNSGGTNYAQKFQGRVTLTRDTSISTVYMELSRLRSDDTAVYYCARDMNILATVPFDIWGQGTMVTVSSGGGGSGGGGSGGGGSDIQMTQSPSSLSASVGDRVTITCRASQSISSYLNWYQQKPGKAPKLLIYAASSLQSGVPSRFSGSGSGTDFTLTVNSLQPEDFATYYCQQGDSVPLTFGGGTRLEIKTTTPAPRPPTPAPTIASQPLSLRPEACRPAAGGAVHTRGLDFACDIYIWAPLAGTCGVLLLSLVITLYCKRGRKKLLYIFKQPFMRPVQTTQEEDGCSCRFPEEEEGGCELRVKFSRSADAPAYQQGQNQLYNELNLGRREEYDVLDKRRGRDPEMGGKPRRKNPQEGLYNELQKDKMAEAYSEIGMKGERRRGKGHDGLYQGLSTATKDTYDALHMQALPPR

SEQ ID NO: 1045 - protein, 747 aa, Artificial Sequence
  source: /note="Description of Artificial Sequence: Synthetic polypeptide"
MALPVTALLLPLALLLHAARPQSLALSLTADQMVSALLDAEPPILYSEYDPTRPFSEASMMGLLTNLADRELVHMINWAKRVPGFVDLTLHDQVHLLECAWMEILMIGLVWRSMEHPGKLLFAPNLLLDRNQGKCVEGGVEIFDMLLATSSRFRMMNLQGEEFVCLKSIILLNSGVYTFLSSTLKSLEEKDHIHRVLDKITDTLIHLMAKAGLTLQQQHQRLAQLLLILSHIRHMSNKRMEHLYSMKCKNVVPLSDLLLEMLDAHRLGTGAEDPRPSRKRRQVQLVQSGAEVKKPGASVKVSCKASGYTFTGYYMHWVRQAPGQGLEWMGWINPNSGGTNYAQKFQGRVTLTRDTSISTVYMELSRLRSDDTAVYYCARDMNILATVPFDIWGQGTMVTVSSGGGGSGGGGSGGGGSDIQMTQSPSSLSASVGDRVTITCRASQSISSYLNWYQQKPGKAPKLLIYAASSLQSGVPSRFSGSGSGTDFTLTVNSLQPEDFATYYCQQGDSVPLTFGGGTRLEIKTTTPAPRPPTPAPTIASQPLSLRPEACRPAAGGAVHTRGLDFACDIYIWAPLAGTCGVLLLSLVITLYCKRGRKKLLYIFKQPFMRPVQTTQEEDGCSCRFPEEEEGGCELRVKFSRSADAPAYQQGQNQLYNELNLGRREEYDVLDKRRGRDPEMGGKPRRKNPQEGLYNELQKDKMAEAYSEIGMKGERRRGKGHDGLYQGLSTATKDTYDALHMQALPPR

SEQ ID NO: 1046 - protein, 749 aa, Artificial Sequence
  source: /note="Description of Artificial Sequence: Synthetic polypeptide"
MALPVTALLLPLALLLHAARPQSLALSLTADQMVSALLDAEPPILYSEYDPTRPFSEASMMGLLTNLADRELVHMINWAKRVPGFVDLALHDQVHLLECAWMEILMIGLVWRSMEHPGKLLFAPNLLLDRNQGKCVEGGVEIFDMLLATSSRFRMMNLQGEEFVCLKSIILLNSGVYTFLSSTLKSLEEKDHIHRVLDKITDTLIHLMAKAGLTLQQQHQRLAQLLLILSHIRHMSSKRMEHLYSMKCKNVVPLSDLLLEMLDAHRLGTGAEDPRPSRKRRSLGDVGEVQLVESGGGLVQPGGSLRLSCAVSGFALSNHGMSWVRRAPGKGLEWVSGIVYSGSTYYAASVKGRFTISRDNSRNTLYLQMNSLRPEDTAIYYCSAHGGESDVWGQGTTVTVSSASGGGGSGGRASGGGGSDIQLTQSPSSLSASVGDRVTITCRASQSISSYLNWYQQKPGKAPKLLIYAASSLQSGVPSRFSGSGSGTDFTLTISSLQPEDFATYYCQQSYSTPYTFGQGTKVEIKTTTPAPRPPTPAPTIASQPLSLRPEACRPAAGGAVHTRGLDFACDIYIWAPLAGTCGVLLLSLVITLYCKRGRKKLLYIFKQPFMRPVQTTQEEDGCSCRFPEEEEGGCELRVKFSRSADAPAYQQGQNQLYNELNLGRREEYDVLDKRRGRDPEMGGKPRRKNPQEGLYNELQKDKMAEAYSEIGMKGERRRGKGHDGLYQGLSTATKDTYDALHMQALPPR

SEQ ID NO: 1047 - protein, 749 aa, Artificial Sequence
  source: /note="Description of Artificial Sequence: Synthetic polypeptide"
MALPVTALLLPLALLLHAARPQSLALSLTADQMVSALLDAEPPILYSEYDPTRPFSEASMMGLLTNLADRELVHMINWAKRVPGFVDLTLHDQVHLLECAWMEILMIGLVWRSMEHPGKLLFAPNLLLDRNQGKCVEGGVEIFDMLLATSSRFRMMNLQGEEFVCLKSIILLNSGVYTFLSSTLKSLEEKDHIHRVLDKITDTLIHLMAKAGLTLQQQHQRLAQLLLILSHIRHMSNKRMEHLYSMKCKNVVPLSDLLLEMLDAHRLGTGAEDPRPSRKRRSLGDVGEVQLVESGGGLVQPGGSLRLSCAVSGFALSNHGMSWVRRAPGKGLEWVSGIVYSGSTYYAASVKGRFTISRDNSRNTLYLQMNSLRPEDTAIYYCSAHGGESDVWGQGTTVTVSSASGGGGSGGRASGGGGSDIQLTQSPSSLSASVGDRVTITCRASQSISSYLNWYQQKPGKAPKLLIYAASSLQSGVPSRFSGSGSGTDFTLTISSLQPEDFATYYCQQSYSTPYTFGQGTKVEIKTTTPAPRPPTPAPTIASQPLSLRPEACRPAAGGAVHTRGLDFACDIYIWAPLAGTCGVLLLSLVITLYCKRGRKKLLYIFKQPFMRPVQTTQEEDGCSCRFPEEEEGGCELRVKFSRSADAPAYQQGQNQLYNELNLGRREEYDVLDKRRGRDPEMGGKPRRKNPQEGLYNELQKDKMAEAYSEIGMKGERRRGKGHDGLYQGLSTATKDTYDALHMQALPPR

SEQ ID NO: 1048 - protein, 743 aa, Artificial Sequence
  source: /note="Description of Artificial Sequence: Synthetic polypeptide"
MALPVTALLLPLALLLHAARPQSLALSLTADQMVSALLDAEPPILYSEYDPTRPFSEASMMGLLTNLADRELVHMINWAKRVPGFVDLALHDQVHLLECAWMEILMIGLVWRSMEHPGKLLFAPNLLLDRNQGKCVEGGVEIFDMLLATSSRFRMMNLQGEEFVCLKSIILLNSGVYTFLSSTLKSLEEKDHIHRVLDKITDTLIHLMAKAGLTLQQQHQRLAQLLLILSHIRHMSSKRMEHLYSMKCKNVVPLSDLLLEMLDAHRLGTGAEDPRPSRKRREVQLVESGGGLVQPGGSLRLSCAVSGFALSNHGMSWVRRAPGKGLEWVSGIVYSGSTYYAASVKGRFTISRDNSRNTLYLQMNSLRPEDTAIYYCSAHGGESDVWGQGTTVTVSSASGGGGSGGRASGGGGSDIQLTQSPSSLSASVGDRVTITCRASQSISSYLNWYQQKPGKAPKLLIYAASSLQSGVPSRFSGSGSGTDFTLTISSLQPEDFATYYCQQSYSTPYTFGQGTKVEIKTTTPAPRPPTPAPTIASQPLSLRPEACRPAAGGAVHTRGLDFACDIYIWAPLAGTCGVLLLSLVITLYCKRGRKKLLYIFKQPFMRPVQTTQEEDGCSCRFPEEEEGGCELRVKFSRSADAPAYQQGQNQLYNELNLGRREEYDVLDKRRGRDPEMGGKPRRKNPQEGLYNELQKDKMAEAYSEIGMKGERRRGKGHDGLYQGLSTATKDTYDALHMQALPPR

SEQ ID NO: 1049 - protein, 743 aa, Artificial Sequence
  source: /note="Description of Artificial Sequence: Synthetic polypeptide"
MALPVTALLLPLALLLHAARPQSLALSLTADQMVSALLDAEPPILYSEYDPTRPFSEASMMGLLTNLADRELVHMINWAKRVPGFVDLTLHDQVHLLECAWMEILMIGLVWRSMEHPGKLLFAPNLLLDRNQGKCVEGGVEIFDMLLATSSRFRMMNLQGEEFVCLKSIILLNSGVYTFLSSTLKSLEEKDHIHRVLDKITDTLIHLMAKAGLTLQQQHQRLAQLLLILSHIRHMSNKRMEHLYSMKCKNVVPLSDLLLEMLDAHRLGTGAEDPRPSRKRREVQLVESGGGLVQPGGSLRLSCAVSGFALSNHGMSWVRRAPGKGLEWVSGIVYSGSTYYAASVKGRFTISRDNSRNTLYLQMNSLRPEDTAIYYCSAHGGESDVWGQGTTVTVSSASGGGGSGGRASGGGGSDIQLTQSPSSLSASVGDRVTITCRASQSISSYLNWYQQKPGKAPKLLIYAASSLQSGVPSRFSGSGSGTDFTLTISSLQPEDFATYYCQQSYSTPYTFGQGTKVEIKTTTPAPRPPTPAPTIASQPLSLRPEACRPAAGGAVHTRGLDFACDIYIWAPLAGTCGVLLLSLVITLYCKRGRKKLLYIFKQPFMRPVQTTQEEDGCSCRFPEEEEGGCELRVKFSRSADAPAYQQGQNQLYNELNLGRREEYDVLDKRRGRDPEMGGKPRRKNPQEGLYNELQKDKMAEAYSEIGMKGERRRGKGHDGLYQGLSTATKDTYDALHMQALPPR

SEQ ID NO: 1050 - DNA, 2253 bp, Artificial Sequence
  source: /note="Description of Artificial Sequence: Synthetic polynucleotide"
atggccctccctgtcaccgccctgctgcttccgctggctcttctgctccacgccgctcggccctcgttggcactttccctgactgccgaccagatggtgtccgcccttctggacgccgagcctccaattctgtactcggagtacgatccgactcgcccgttctccgaagccagcatgatgggcctgttgactaacctggcggaccgcgagttggtgcacatgattaactgggctaagcgggtgccgggcttcgtggacctggccctgcacgaccaagtgcacctcctggaatgcgcctggatggaaatcctcatgatcggcctcgtgtggagatccatggagcatcccggaaagctcctgtttgcacccaacctcctgcttgatcgcaaccagggaaaatgcgtggaagggggtgtcgagattttcgacatgctgctcgccacctcttcccggttccggatgatgaatctgcagggagaagagttcgtgtgtctgaagtcaatcatcctgctgaactccggggtctataccttcctgagctcgaccctcaagtcactggaggaaaaagaccacatccatcgcgtgctcgataagatcaccgacacccttatccatctcatggcgaaggctggactgaccctgcaacagcagcaccagaggctggcccagttgctgctgattctgagccacatccggcacatgtcgtccaagaggatggaacacctgtacagcatgaagtgcaagaacgtcgtgcctctgtccgatctgctcctggaaatgctggacgcgcacagactcggaaccggcgcggaagacccccggccctccaggaagcgaaggtccctcggagacgtgggtgaaattgtgatgacccagtcacccgccactcttagcctttcacccggtgagcgcgcaaccctgtcttgcagagcctcccaagacatctcaaaataccttaattggtatcaacagaagcccggacaggctcctcgccttctgatctaccacaccagccggctccattctggaatccctgccaggttcagcggtagcggatctgggaccgactacaccctcactatcagctcactgcagccagaggacttcgctgtctatttctgtcagcaagggaacaccctgccctacacctttggacagggcaccaagctcgagattaaaggtggaggtggcagcggaggaggtgggtccggcggtggaggaagccaggtccaactccaagaaagcggaccgggtcttgtgaagccatcagaaactctttcactgacttgtactgtgagcggagtgtctctccccgattacggggtgtcttggatcagacagccaccggggaagggtctggaatggattggagtgatttggggctctgagactacttactactcttcatccctcaagtcacgcgtcaccatctcaaaggacaactctaagaatcaggtgtcactgaaactgtcatctgtgaccgcagccgacaccgccgtgtactattgcgctaagcattactattatggcgggagctacgcaatggattactggggacagggtactctggtcaccgtgtccagcaccactaccccagcaccgaggccacccaccccggctcctaccatcgcctcccagcctctgtccctgcgtccggaggcatgtagacccgcagctggtggggccgtgcatacccggggtcttgacttcgcctgcgatatctacatttgggcccctctggctggtacttgcggggtcctgctgctttcactcgtgatcactctttactgtaagcgcggtcggaagaagctgctgtacatctttaagcaacccttcatgaggcctgtgcagactactcaagaggaggacggctgttcatgccggttcccagaggaggaggaaggcggctgcgaactgcgcgtgaaattcagccgcagcgcagatgctccagcctaccagcaggggcagaaccagctctacaacgaactcaatcttggtcggagagaggagtacgacgtgctggacaagcggagaggacgggacccagaaatgggcgggaagccgcgcagaaagaatccccaagagggcctgtacaacgagctccaaaaggataagatggcagaagcctatagcgagattggtatgaaaggggaacgcagaagaggcaaaggccacgacggactgtaccagggactcagcaccgccaccaaggacacctatgacgctcttcacatgcaggccctgccgcctcgg

SEQ ID NO: 1051 - DNA, 2253 bp, Artificial Sequence
  source: /note="Description of Artificial Sequence: Synthetic polynucleotide"
atggccctccctgtcaccgccctgctgcttccgctggctcttctgctccacgccgctcggccctcgttggcactttccctgactgccgaccagatggtgtccgcccttctggacgccgagcctccaattctgtactcggagtacgatccgactcgcccgttctccgaagccagcatgatgggcctgttgactaacctggcggaccgcgagttggtgcacatgattaactgggctaagcgggtgccgggcttcgtggacctgaccctgcacgaccaagtgcacctcctggaatgcgcctggatggaaatcctcatgatcggcctcgtgtggagatccatggagcatcccggaaagctcctgtttgcacccaacctcctgcttgatcgcaaccagggaaaatgcgtggaagggggtgtcgagattttcgacatgctgctcgccacctcttcccggttccggatgatgaatctgcagggagaagagttcgtgtgtctgaagtcaatcatcctgctgaactccggggtctataccttcctgagctcgaccctcaagtcactggaggaaaaagaccacatccatcgcgtgctcgataagatcaccgacacccttatccatctcatggcgaaggctggactgaccctgcaacagcagcaccagaggctggcccagttgctgctgattctgagccacatccggcacatgtcgaacaagaggatggaacacctgtacagcatgaagtgcaagaacgtcgtgcctctgtccgatctgctcctggaaatgctggacgcgcacagactcggaaccggcgcggaagacccccggccctccaggaagcgaaggtccctcggagacgtgggtgaaattgtgatgacccagtcacccgccactcttagcctttcacccggtgagcgcgcaaccctgtcttgcagagcctcccaagacatctcaaaataccttaattggtatcaacagaagcccggacaggctcctcgccttctgatctaccacaccagccggctccattctggaatccctgccaggttcagcggtagcggatctgggaccgactacaccctcactatcagctcactgcagccagaggacttcgctgtctatttctgtcagcaagggaacaccctgccctacacctttggacagggcaccaagctcgagattaaaggtggaggtggcagcggaggaggtgggtccggcggtggaggaagccaggtccaactccaagaaagcggaccgggtcttgtgaagccatcagaaactctttcactgacttgtactgtgagcggagtgtctctccccgattacggggtgtcttggatcagacagccaccggggaagggtctggaatggattggagtgatttggggctctgagactacttactactcttcatccctcaagtcacgcgtcaccatctcaaaggacaactctaagaatcaggtgtcactgaaactgtcatctgtgaccgcagccgacaccgccgtgtactattgcgctaagcattactattatggcgggagctacgcaatggattactggggacagggtactctggtcaccgtgtccagcaccactaccccagcaccgaggccacccaccccggctcctaccatcgcctcccagcctctgtccctgcgtccggaggcatgtagacccgcagctggtggggccgtgcatacccggggtcttgacttcgcctgcgatatctacatttgggcccctctggctggtacttgcggggtcctgctgctttcactcgtgatcactctttactgtaagcgcggtcggaagaagctgctgtacatctttaagcaacccttcatgaggcctgtgcagactactcaagaggaggacggctgttcatgccggttcccagaggaggaggaaggcggctgcgaactgcgcgtgaaattcagccgcagcgcagatgctccagcctaccagcaggggcagaaccagctctacaacgaactcaatcttggtcggagagaggagtacgacgtgctggacaagcggagaggacgggacccagaaatgggcgggaagccgcgcagaaagaatccccaagagggcctgtacaacgagctccaaaaggataagatggcagaagcctatagcgagattggtatgaaaggggaacgcagaagaggcaaaggccacgacggactgtaccagggactcagcaccgccaccaaggacacctatgacgctcttcacatgcaggccctgccgcctcgg

SEQ ID NO: 1052 - DNA, 2235 bp, Artificial Sequence
  source: /note="Description of Artificial Sequence: Synthetic polynucleotide"
atggccctccctgtcaccgccctgctgcttccgctggctcttctgctccacgccgctcggccctcgttggcactttccctgactgccgaccagatggtgtccgcccttctggacgccgagcctccaattctgtactcggagtacgatccgactcgcccgttctccgaagccagcatgatgggcctgttgactaacctggcggaccgcgagttggtgcacatgattaactgggctaagcgggtgccgggcttcgtggacctggccctgcacgaccaagtgcacctcctggaatgcgcctggatggaaatcctcatgatcggcctcgtgtggagatccatggagcatcccggaaagctcctgtttgcacccaacctcctgcttgatcgcaaccagggaaaatgcgtggaagggggtgtcgagattttcgacatgctgctcgccacctcttcccggttccggatgatgaatctgcagggagaagagttcgtgtgtctgaagtcaatcatcctgctgaactccggggtctataccttcctgagctcgaccctcaagtcactggaggaaaaagaccacatccatcgcgtgctcgataagatcaccgacacccttatccatctcatggcgaaggctggactgaccctgcaacagcagcaccagaggctggcccagttgctgctgattctgagccacatccggcacatgtcgtccaagaggatggaacacctgtacagcatgaagtgcaagaacgtcgtgcctctgtccgatctgctcctggaaatgctggacgcgcacagactcgggacgggagctgaagatccacgacccagcagaaagcgacgggaaattgtgatgacccagtcacccgccactcttagcctttcacccggtgagcgcgcaaccctgtcttgcagagcctcccaagacatctcaaaataccttaattggtatcaacagaagcccggacaggctcctcgccttctgatctaccacaccagccggctccattctggaatccctgccaggttcagcggtagcggatctgggaccgactacaccctcactatcagctcactgcagccagaggacttcgctgtctatttctgtcagcaagggaacaccctgccctacacctttggacagggcaccaagctcgagattaaaggtggaggtggcagcggaggaggtgggtccggcggtggaggaagccaggtccaactccaagaaagcggaccgggtcttgtgaagccatcagaaactctttcactgacttgtactgtgagcggagtgtctctccccgattacggggtgtcttggatcagacagccaccggggaagggtctggaatggattggagtgatttggggctctgagactacttactactcttcatccctcaagtcacgcgtcaccatctcaaaggacaactctaagaatcaggtgtcactgaaactgtcatctgtgaccgcagccgacaccgccgtgtactattgcgctaagcattactattatggcgggagctacgcaatggattactggggacagggtactctggtcaccgtgtccagcaccactaccccagcaccgaggccacccaccccggctcctaccatcgcctcccagcctctgtccctgcgtccggaggcatgtagacccgcagctggtggggccgtgcatacccggggtcttgacttcgcctgcgatatctacatttgggcccctctggctggtacttgcggggtcctgctgctttcactcgtgatcactctttactgtaagcgcggtcggaagaagctgctgtacatctttaagcaacccttcatgaggcctgtgcagactactcaagaggaggacggctgttcatgccggttcccagaggaggaggaaggcggctgcgaactgcgcgtgaaattcagccgcagcgcagatgctccagcctaccagcaggggcagaaccagctctacaacgaactcaatcttggtcggagagaggagtacgacgtgctggacaagcggagaggacgggacccagaaatgggcgggaagccgcgcagaaagaatccccaagagggcctgtacaacgagctccaaaaggataagatggcagaagcctatagcgagattggtatgaaaggggaacgcagaagaggcaaaggccacgacggactgtaccagggactcagcaccgccaccaaggacacctatgacgctcttcacatgcaggccctgccgcctcgg

SEQ ID NO: 1053 - DNA, 2235 bp, Artificial Sequence
  source: /note="Description of Artificial Sequence: Synthetic polynucleotide"
atggccctccctgtcaccgccctgctgcttccgctggctcttctgctccacgccgctcggccctcgttggcactttccctgactgccgaccagatggtgtccgcccttctggacgccgagcctccaattctgtactcggagtacgatccgactcgcccgttctccgaagccagcatgatgggcctgttgactaacctggcggaccgcgagttggtgcacatgattaactgggctaagcgggtgccgggcttcgtggacctgaccctgcacgaccaagtgcacctcctggaatgcgcctggatggaaatcctcatgatcggcctcgtgtggagatccatggagcatcccggaaagctcctgtttgcacccaacctcctgcttgatcgcaaccagggaaaatgcgtggaagggggtgtcgagattttcgacatgctgctcgccacctcttcccggttccggatgatgaatctgcagggagaagagttcgtgtgtctgaagtcaatcatcctgctgaactccggggtctataccttcctgagctcgaccctcaagtcactggaggaaaaagaccacatccatcgcgtgctcgataagatcaccgacacccttatccatctcatggcgaaggctggactgaccctgcaacagcagcaccagaggctggcccagttgctgctgattctgagccacatccggcacatgtcgaacaagaggatggaacacctgtacagcatgaagtgcaagaacgtcgtgcctctgtccgatctgctcctggaaatgctggacgcgcacagactcgggacgggagctgaagatccacgacccagcagaaagcgacgggaaattgtgatgacccagtcacccgccactcttagcctttcacccggtgagcgcgcaaccctgtcttgcagagcctcccaagacatctcaaaataccttaattggtatcaacagaagcccggacaggctcctcgccttctgatctaccacaccagccggctccattctggaatccctgccaggttcagcggtagcggatctgggaccgactacaccctcactatcagctcactgcagccagaggacttcgctgtctatttctgtcagcaagggaacaccctgccctacacctttggacagggcaccaagctcgagattaaaggtggaggtggcagcggaggaggtgggtccggcggtggaggaagccaggtccaactccaagaaagcggaccgggtcttgtgaagccatcagaaactctttcactgacttgtactgtgagcggagtgtctctccccgattacggggtgtcttggatcagacagccaccggggaagggtctggaatggattggagtgatttggggctctgagactacttactactcttcatccctcaagtcacgcgtcaccatctcaaaggacaactctaagaatcaggtgtcactgaaactgtcatctgtgaccgcagccgacaccgccgtgtactattgcgctaagcattactattatggcgggagctacgcaatggattactggggacagggtactctggtcaccgtgtccagcaccactaccccagcaccgaggccacccaccccggctcctaccatcgcctcccagcctctgtccctgcgtccggaggcatgtagacccgcagctggtggggccgtgcatacccggggtcttgacttcgcctgcgatatctacatttgggcccctctggctggtacttgcggggtcctgctgctttcactcgtgatcactctttactgtaagcgcggtcggaagaagctgctgtacatctttaagcaacccttcatgaggcctgtgcagactactcaagaggaggacggctgttcatgccggttcccagaggaggaggaaggcggctgcgaactgcgcgtgaaattcagccgcagcgcagatgctccagcctaccagcaggggcagaaccagctctacaacgaactcaatcttggtcggagagaggagtacgacgtgctggacaagcggagaggacgggacccagaaatgggcgggaagccgcgcagaaagaatccccaagagggcctgtacaacgagctccaaaaggataagatggcagaagcctatagcgagattggtatgaaaggggaacgcagaagaggcaaaggccacgacggactgtaccagggactcagcaccgccaccaaggacacctatgacgctcttcacatgcaggccctgccgcctcgg

SEQ ID NO: 1054 - DNA, 2256 bp, Artificial Sequence
  source: /note="Description of Artificial Sequence: Synthetic polynucleotide"
atggccctccctgtcaccgccctgctgcttccgctggctcttctgctccacgccgctcggccctcgttggcactttccctgactgccgaccagatggtgtccgcccttctggacgccgagcctccaattctgtactcggagtacgatccgactcgcccgttctccgaagccagcatgatgggcctgttgactaacctggcggaccgcgagttggtgcacatgattaactgggctaagcgggtgccgggcttcgtggacctggccctgcacgaccaagtgcacctcctggaatgcgcctggatggaaatcctcatgatcggcctcgtgtggagatccatggagcatcccggaaagctcctgtttgcacccaacctcctgcttgatcgcaaccagggaaaatgcgtggaagggggtgtcgagattttcgacatgctgctcgccacctcttcccggttccggatgatgaatctgcagggagaagagttcgtgtgtctgaagtcaatcatcctgctgaactccggggtctataccttcctgagctcgaccctcaagtcactggaggaaaaagaccacatccatcgcgtgctcgataagatcaccgacacccttatccatctcatggcgaaggctggactgaccctgcaacagcagcaccagaggctggcccagttgctgctgattctgagccacatccggcacatgtcgtccaagaggatggaacacctgtacagcatgaagtgcaagaacgtcgtgcctctgtccgatctgctcctggaaatgctggacgcgcacagactcggaaccggcgcggaagacccccggccctccaggaagcgaaggtccctcggagacgtgggtcaagtgcaactcgtccaaagcggagcggaagtcaagaaacccggagcgagcgtgaaagtgtcctgcaaagcctccggctacacctttacgggctactacatgcactgggtgcgccaggcaccaggacagggtcttgaatggatgggatggatcaaccctaattcgggcggaactaactacgcacagaagttccaggggagagtgactctgactcgggatacctccatctcaactgtctacatggaactctcccgcttgcggtcagatgatacggcagtgtactactgcgcccgcgacatgaatatcctggctaccgtgccgttcgacatctggggacaggggactatggttactgtctcatcgggcggtggaggttcaggaggaggcggctcgggaggcggaggttcggacattcagatgacccagtccccatcctctctgtcggccagcgtcggagatagggtgaccattacctgtcgggcctcgcaaagcatctcctcgtacctcaactggtatcagcaaaagccgggaaaggcgcctaagctgctgatctacgccgcttcgagcttgcaaagcggggtgccatccagattctcgggatcaggctcaggaaccgacttcaccctgaccgtgaacagcctccagccggaggactttgccacttactactgccagcagggagactccgtgccgcttactttcggggggggtacccgcctggagatcaagaccactaccccagcaccgaggccacccaccccggctcctaccatcgcctcccagcctctgtccctgcgtccggaggcatgtagacccgcagctggtggggccgtgcatacccggggtcttgacttcgcctgcgatatctacatttgggcccctctggctggtacttgcggggtcctgctgctttcactcgtgatcactctttactgtaagcgcggtcggaagaagctgctgtacatctttaagcaacccttcatgaggcctgtgcagactactcaagaggaggacggctgttcatgccggttcccagaggaggaggaaggcggctgcgaactgcgcgtgaaattcagccgcagcgcagatgctccagcctaccagcaggggcagaaccagctctacaacgaactcaatcttggtcggagagaggagtacgacgtgctggacaagcggagaggacgggacccagaaatgggcgggaagccgcgcagaaagaatccccaagagggcctgtacaacgagctccaaaaggataagatggcagaagcctatagcgagattggtatgaaaggggaacgcagaagaggcaaaggccacgacggactgtaccagggactcagcaccgccaccaaggacacctatgacgctcttcacatgcaggccctgccgcctcgg

SEQ ID NO: 1055 - DNA, 2256 bp, Artificial Sequence
  source: /note="Description of Artificial Sequence: Synthetic polynucleotide"
atggccctccctgtcaccgccctgctgcttccgctggctcttctgctccacgccgctcggccctcgttggcactttccctgactgccgaccagatggtgtccgcccttctggacgccgagcctccaattctgtactcggagtacgatccgactcgcccgttctccgaagccagcatgatgggcctgttgactaacctggcggaccgcgagttggtgcacatgattaactgggctaagcgggtgccgggcttcgtggacctgaccctgcacgaccaagtgcacctcctggaatgcgcctggatggaaatcctcatgatcggcctcgtgtggagatccatggagcatcccggaaagctcctgtttgcacccaacctcctgcttgatcgcaaccagggaaaatgcgtggaagggggtgtcgagattttcgacatgctgctcgccacctcttcccggttccggatgatgaatctgcagggagaagagttcgtgtgtctgaagtcaatcatcctgctgaactccggggtctataccttcctgagctcgaccctcaagtcactggaggaaaaagaccacatccatcgcgtgctcgataagatcaccgacacccttatccatctcatggcgaaggctggactgaccctgcaacagcagcaccagaggctggcccagttgctgctgattctgagccacatccggcacatgtcgaacaagaggatggaacacctgtacagcatgaagtgcaagaacgtcgtgcctctgtccgatctgctcctggaaatgctggacgcgcacagactcggaaccggcgcggaagacccccggccctccaggaagcgaaggtccctcggagacgtgggtcaagtgcaactcgtccaaagcggagcggaagtcaagaaacccggagcgagcgtgaaagtgtcctgcaaagcctccggctacacctttacgggctactacatgcactgggtgcgccaggcaccaggacagggtcttgaatggatgggatggatcaaccctaattcgggcggaactaactacgcacagaagttccaggggagagtgactctgactcgggatacctccatctcaactgtctacatggaactctcccgcttgcggtcagatgatacggcagtgtactactgcgcccgcgacatgaatatcctggctaccgtgccgttcgacatctggggacaggggactatggttactgtctcatcgggcggtggaggttcaggaggaggcggctcgggaggcggaggttcggacattcagatgacccagtccccatcctctctgtcggccagcgtcggagatagggtgaccattacctgtcgggcctcgcaaagcatctcctcgtacctcaactggtatcagcaaaagccgggaaaggcgcctaagctgctgatctacgccgcttcgagcttgcaaagcggggtgccatccagattctcgggatcaggctcaggaaccgacttcaccctgaccgtgaacagcctccagccggaggactttgccacttactactgccagcagggagactccgtgccgcttactttcggggggggtacccgcctggagatcaagaccactaccccagcaccgaggccacccaccccggctcctaccatcgcctcccagcctctgtccctgcgtccggaggcatgtagacccgcagctggtggggccgtgcatacccggggtcttgacttcgcctgcgatatctacatttgggcccctctggctggtacttgcggggtcctgctgctttcactcgtgatcactctttactgtaagcgcggtcggaagaagctgctgtacatctttaagcaacccttcatgaggcctgtgcagactactcaagaggaggacggctgttcatgccggttcccagaggaggaggaaggcggctgcgaactgcgcgtgaaattcagccgcagcgcagatgctccagcctaccagcaggggcagaaccagctctacaacgaactcaatcttggtcggagagaggagtacgacgtgctggacaagcggagaggacgggacccagaaatgggcgggaagccgcgcagaaagaatccccaagagggcctgtacaacgagctccaaaaggataagatggcagaagcctatagcgagattggtatgaaaggggaacgcagaagaggcaaaggccacgacggactgtaccagggactcagcaccgccaccaaggacacctatgacgctcttcacatgcaggccctgccgcctcgg

SEQ ID NO: 1056 - DNA, 2238 bp, Artificial Sequence
  source: /note="Description of Artificial Sequence: Synthetic polynucleotide"
atggccctccctgtcaccgccctgctgcttccgctggctcttctgctccacgccgctcggccctcgttggcactttccctgactgccgaccagatggtgtccgcccttctggacgccgagcctccaattctgtactcggagtacgatccgactcgcccgttctccgaagccagcatgatgggcctgttgactaacctggcggaccgcgagttggtgcacatgattaactgggctaagcgggtgccgggcttcgtggacctggccctgcacgaccaagtgcacctcctggaatgcgcctggatggaaatcctcatgatcggcctcgtgtggagatccatggagcatcccggaaagctcctgtttgcacccaacctcctgcttgatcgcaaccagggaaaatgcgtggaagggggtgtcgagattttcgacatgctgctcgccacctcttcccggttccggatgatgaatctgcagggagaagagttcgtgtgtctgaagtcaatcatcctgctgaactccggggtctataccttcctgagctcgaccctcaagtcactggaggaaaaagaccacatccatcgcgtgctcgataagatcaccgacacccttatccatctcatggcgaaggctggactgaccctgcaacagcagcaccagaggctggcccagttgctgctgattctgagccacatccggcacatgtcgtccaagaggatggaacacctgtacagcatgaagtgcaagaacgtcgtgcctctgtccgatctgctcctggaaatgctggacgcgcacagactcggaaccggcgcggaagacccccggccctccaggaagcgaaggcaagtgcaactcgtccaaagcggagcggaagtcaagaaacccggagcgagcgtgaaagtgtcctgcaaagcctccggctacacctttacgggctactacatgcactgggtgcgccaggcaccaggacagggtcttgaatggatgggatggatcaaccctaattcgggcggaactaactacgcacagaagttccaggggagagtgactctgactcgggatacctccatctcaactgtctacatggaactctcccgcttgcggtcagatgatacggcagtgtactactgcgcccgcgacatgaatatcctggctaccgtgccgttcgacatctggggacaggggactatggttactgtctcatcgggcggtggaggttcaggaggaggcggctcgggaggcggaggttcggacattcagatgacccagtccccatcctctctgtcggccagcgtcggagatagggtgaccattacctgtcgggcctcgcaaagcatctcctcgtacctcaactggtatcagcaaaagccgggaaaggcgcctaagctgctgatctacgccgcttcgagcttgcaaagcggggtgccatccagattctcgggatcaggctcaggaaccgacttcaccctgaccgtgaacagcctccagccggaggactttgccacttactactgccagcagggagactccgtgccgcttactttcggggggggtacccgcctggagatcaagaccactaccccagcaccgaggccacccaccccggctcctaccatcgcctcccagcctctgtccctgcgtccggaggcatgtagacccgcagctggtggggccgtgcatacccggggtcttgacttcgcctgcgatatctacatttgggcccctctggctggtacttgcggggtcctgctgctttcactcgtgatcactctttactgtaagcgcggtcggaagaagctgctgtacatctttaagcaacccttcatgaggcctgtgcagactactcaagaggaggacggctgttcatgccggttcccagaggaggaggaaggcggctgcgaactgcgcgtgaaattcagccgcagcgcagatgctccagcctaccagcaggggcagaaccagctctacaacgaactcaatcttggtcggagagaggagtacgacgtgctggacaagcggagaggacgggacccagaaatgggcgggaagccgcgcagaaagaatccccaagagggcctgtacaacgagctccaaaaggataagatggcagaagcctatagcgagattggtatgaaaggggaacgcagaagaggcaaaggccacgacggactgtaccagggactcagcaccgccaccaaggacacctatgacgctcttcacatgcaggccctgccgcctcgg

SEQ ID NO: 1057 - DNA, 2238 bp, Artificial Sequence
  source: /note="Description of Artificial Sequence: Synthetic polynucleotide"
atggccctccctgtcaccgccctgctgcttccgctggctcttctgctccacgccgctcggccctcgttggcactttccctgactgccgaccagatggtgtccgcccttctggacgccgagcctccaattctgtactcggagtacgatccgactcgcccgttctccgaagccagcatgatgggcctgttgactaacctggcggaccgcgagttggtgcacatgattaactgggctaagcgggtgccgggcttcgtggacctgaccctgcacgaccaagtgcacctcctggaatgcgcctggatggaaatcctcatgatcggcctcgtgtggagatccatggagcatcccggaaagctcctgtttgcacccaacctcctgcttgatcgcaaccagggaaaatgcgtggaagggggtgtcgagattttcgacatgctgctcgccacctcttcccggttccggatgatgaatctgcagggagaagagttcgtgtgtctgaagtcaatcatcctgctgaactccggggtctataccttcctgagctcgaccctcaagtcactggaggaaaaagaccacatccatcgcgtgctcgataagatcaccgacacccttatccatctcatggcgaaggctggactgaccctgcaacagcagcaccagaggctggcccagttgctgctgattctgagccacatccggcacatgtcgaacaagaggatggaacacctgtacagcatgaagtgcaagaacgtcgtgcctctgtccgatctgctcctggaaatgctggacgcgcacagactcgggacgggagctgaagatccacgacccagcagaaagcgacggcaagtgcaactcgtccaaagcggagcggaagtcaagaaacccggagcgagcgtgaaagtgtcctgcaaagcctccggctacacctttacgggctactacatgcactgggtgcgccaggcaccaggacagggtcttgaatggatgggatggatcaaccctaattcgggcggaactaactacgcacagaagttccaggggagagtgactctgactcgggatacctccatctcaactgtctacatggaactctcccgcttgcggtcagatgatacggcagtgtactactgcgcccgcgacatgaatatcctggctaccgtgccgttcgacatctggggacaggggactatggttactgtctcatcgggcggtggaggttcaggaggaggcggctcgggaggcggaggttcggacattcagatgacccagtccccatcctctctgtcggccagcgtcggagatagggtgaccattacctgtcgggcctcgcaaagcatctcctcgtacctcaactggtatcagcaaaagccgggaaaggcgcctaagctgctgatctacgccgcttcgagcttgcaaagcggggtgccatccagattctcgggatcaggctcaggaaccgacttcaccctgaccgtgaacagcctccagccggaggactttgccacttactactgccagcagggagactccgtgccgcttactttcggggggggtacccgcctggagatcaagaccactaccccagcaccgaggccacccaccccggctcctaccatcgcctcccagcctctgtccctgcgtccggaggcatgtagacccgcagctggtggggccgtgcatacccggggtcttgacttcgcctgcgatatctacatttgggcccctctggctggtacttgcggggtcctgctgctttcactcgtgatcactctttactgtaagcgcggtcggaagaagctgctgtacatctttaagcaacccttcatgaggcctgtgcagactactcaagaggaggacggctgttcatgccggttcccagaggaggaggaaggcggctgcgaactgcgcgtgaaattcagccgcagcgcagatgctccagcctaccagcaggggcagaaccagctctacaacgaactcaatcttggtcggagagaggagtacgacgtgctggacaagcggagaggacgggacccagaaatgggcgggaagccgcgcagaaagaatccccaagagggcctgtacaacgagctccaaaaggataagatggcagaagcctatagcgagattggtatgaaaggggaacgcagaagaggcaaaggccacgacggactgtaccagggactcagcaccgccaccaaggacacctatgacgctcttcacatgcaggccctgccgcctcgg

SEQ ID NO: 1058 - DNA, 2244 bp, Artificial Sequence
  source: /note="Description of Artificial Sequence: Synthetic polynucleotide"
atggccctccctgtcaccgccctgctgcttccgctggctcttctgctccacgccgctcggccctcgttggcactttccctgactgccgaccagatggtgtccgcccttctggacgccgagcctccaattctgtactcggagtacgatccgactcgcccgttctccgaagccagcatgatgggcctgttgactaacctggcggaccgcgagttggtgcacatgattaactgggctaagcgggtgccgggcttcgtggacctggccctgcacgaccaagtgcacctcctggaatgcgcctggatggaaatcctcatgatcggcctcgtgtggagatccatggagcatcccggaaagctcctgtttgcacccaacctcctgcttgatcgcaaccagggaaaatgcgtggaagggggtgtcgagattttcgacatgctgctcgccacctcttcccggttccggatgatgaatctgcagggagaagagttcgtgtgtctgaagtcaatcatcctgctgaactccggggtctataccttcctgagctcgaccctcaagtcactggaggaaaaagaccacatccatcgcgtgctcgataagatcaccgacacccttatccatctcatggcgaaggctggactgaccctgcaacagcagcaccagaggctggcccagttgctgctgattctgagccacatccggcacatgtcgtccaagaggatggaacacctgtacagcatgaagtgcaagaacgtcgtgcctctgtccgatctgctcctggaaatgctggacgcgcacagactcggaaccggcgcggaagacccccggccctccaggaagcgaaggtccctcggagacgtgggtgaagtgcaattggtggaatcagggggaggacttgtgcagcctggaggatcgctgagactgtcatgtgccgtgtccggctttgccctgtccaaccacgggatgtcctgggtccgccgcgcgcctggaaagggcctcgaatgggtgtcgggtattgtgtacagcggtagcacctactatgccgcatccgtgaaggggagattcaccatcagccgggacaactccaggaacactctgtacctccaaatgaattcgctgaggccagaggacactgccatctactactgctccgcgcatggcggagagtccgacgtctggggacaggggaccaccgtgaccgtgtctagcgcgtccggcggaggcggcagcgggggtcgggcatcagggggcggcggatcggacatccagctcacccagtccccgagctcgctgtccgcctccgtgggagatcgggtcaccatcacgtgccgcgccagccagtcgatttcctcctacctgaactggtaccaacagaagcccggaaaagccccgaagcttctcatctacgccgcctcgagcctgcagtcaggagtgccctcacggttctccggctccggttccggtactgatttcaccctgaccatttcctccctgcaaccggaggacttcgctacttactactgccagcagtcgtactccaccccctacactttcggacaaggcaccaaggtcgaaatcaagaccactaccccagcaccgaggccacccaccccggctcctaccatcgcctcccagcctctgtccctgcgtccggaggcatgtagacccgcagctggtggggccgtgcatacccggggtcttgacttcgcctgcgatatctacatttgggcccctctggctggtacttgcggggtcctgctgctttcactcgtgatcactctttactgtaagcgcggtcggaagaagctgctgtacatctttaagcaacccttcatgaggcctgtgcagactactcaagaggaggacggctgttcatgccggttcccagaggaggaggaaggcggctgcgaactgcgcgtgaaattcagccgcagcgcagatgctccagcctaccagcaggggcagaaccagctctacaacgaactcaatcttggtcggagagaggagtacgacgtgctggacaagcggagaggacgggacccagaaatgggcgggaagccgcgcagaaagaatccccaagagggcctgtacaacgagctccaaaaggataagatggcagaagcctatagcgagattggtatgaaaggggaacgcagaagaggcaaaggccacgacggactgtaccagggactcagcaccgccaccaaggacacctatgacgctcttcacatgcaggccctgccgcctcgg

SEQ ID NO: 1059 - DNA, 2244 bp, Artificial Sequence
  source: /note="Description of Artificial Sequence: Synthetic polynucleotide"
atggccctccctgtcaccgccctgctgcttccgctggctcttctgctccacgccgctcggccctcgttggcactttccctgactgccgaccagatggtgtccgcccttctggacgccgagcctccaattctgtactcggagtacgatccgactcgcccgttctccgaagccagcatgatgggcctgttgactaacctggcggaccgcgagttggtgcacatgattaactgggctaagcgggtgccgggcttcgtggacctgaccctgcacgaccaagtgcacctcctggaatgcgcctggatggaaatcctcatgatcggcctcgtgtggagatccatggagcatcccggaaagctcctgtttgcacccaacctcctgcttgatcgcaaccagggaaaatgcgtggaagggggtgtcgagattttcgacatgctgctcgccacctcttcccggttccggatgatgaatctgcagggagaagagttcgtgtgtctgaagtcaatcatcctgctgaactccggggtctataccttcctgagctcgaccctcaagtcactggaggaaaaagaccacatccatcgcgtgctcgataagatcaccgacacccttatccatctcatggcgaaggctggactgaccctgcaacagcagcaccagaggctggcccagttgctgctgattctgagccacatccggcacatgtcgaacaagaggatggaacacctgtacagcatgaagtgcaagaacgtcgtgcctctgtccgatctgctcctggaaatgctggacgcgcacagactcggaaccggcgcggaagacccccggccctccaggaagcgaaggtccctcggagacgtgggtgaagtgcaattggtggaatcagggggaggacttgtgcagcctggaggatcgctgagactgtcatgtgccgtgtccggctttgccctgtccaaccacgggatgtcctgggtccgccgcgcgcctggaaagggcctcgaatgggtgtcgggtattgtgtacagcggtagcacctactatgccgcatccgtgaaggggagattcaccatcagccgggacaactccaggaacactctgtacctccaaatgaattcgctgaggccagaggacactgccatctactactgctccgcgcatggcggagagtccgacgtctggggacaggggaccaccgtgaccgtgtctagcgcgtccggcggaggcggcagcgggggtcgggcatcagggggcggcggatcggacatccagctcacccagtccccgagctcgctgtccgcctccgtgggagatcgggtcaccatcacgtgccgcgccagccagtcgatttcctcctacctgaactggtaccaacagaagcccggaaaagccccgaagcttctcatctacgccgcctcgagcctgcagtcaggagtgccctcacggttctccggctccggttccggtactgatttcaccctgaccatttcctccctgcaaccggaggacttcgctacttactactgccagcagtcgtactccaccccctacactttcggacaaggcaccaaggtcgaaatcaagaccactaccccagcaccgaggccacccaccccggctcctaccatcgcctcccagcctctgtccctgcgtccggaggcatgtagacccgcagctggtggggccgtgcatacccggggtcttgacttcgcctgcgatatctacatttgggcccctctggctggtacttgcggggtcctgctgctttcactcgtgatcactctttactgtaagcgcggtcggaagaagctgctgtacatctttaagcaacccttcatgaggcctgtgcagactactcaagaggaggacggctgttcatgccggttcccagaggaggaggaaggcggctgcgaactgcgcgtgaaattcagccgcagcgcagatgctccagcctaccagcaggggcagaaccagctctacaacgaactcaatcttggtcggagagaggagtacgacgtgctggacaagcggagaggacgggacccagaaatgggcgggaagccgcgcagaaagaatccccaagagggcctgtacaacgagctccaaaaggataagatggcagaagcctatagcgagattggtatgaaaggggaacgcagaagaggcaaaggccacgacggactgtaccagggactcagcaccgccaccaaggacacctatgacgctcttcacatgcaggccctgccgcctcgg

SEQ ID NO: 1060 - DNA, 2226 bp, Artificial Sequence
  source: /note="Description of Artificial Sequence: Synthetic polynucleotide"
atggccctccctgtcaccgccctgctgcttccgctggctcttctgctccacgccgctcggccctcgttggcactttccctgactgccgaccagatggtgtccgcccttctggacgccgagcctccaattctgtactcggagtacgatccgactcgcccgttctccgaagccagcatgatgggcctgttgactaacctggcggaccgcgagttggtgcacatgattaactgggctaagcgggtgccgggcttcgtggacctggccctgcacgaccaagtgcacctcctggaatgcgcctggatggaaatcctcatgatcggcctcgtgtggagatccatggagcatcccggaaagctcctgtttgcacccaacctcctgcttgatcgcaaccagggaaaatgcgtggaagggggtgtcgagattttcgacatgctgctcgccacctcttcccggttccggatgatgaatctgcagggagaagagttcgtgtgtctgaagtcaatcatcctgctgaactccggggtctataccttcctgagctcgaccctcaagtcactggaggaaaaagaccacatccatcgcgtgctcgataagatcaccgacacccttatccatctcatggcgaaggctggactgaccctgcaacagcagcaccagaggctggcccagttgctgctgattctgagccacatccggcacatgtcgtccaagaggatggaacacctgtacagcatgaagtgcaagaacgtcgtgcctctgtccgatctgctcctggaaatgctggacgcgcacagactcgggacgggagctgaagatccacgacccagcagaaagcgacgggaagtgcaattggtggaatcagggggaggacttgtgcagcctggaggatcgctgagactgtcatgtgccgtgtccggctttgccctgtccaaccacgggatgtcctgggtccgccgcgcgcctggaaagggcctcgaatgggtgtcgggtattgtgtacagcggtagcacctactatgccgcatccgtgaaggggagattcaccatcagccgggacaactccaggaacactctgtacctccaaatgaattcgctgaggccagaggacactgccatctactactgctccgcgcatggcggagagtccgacgtctggggacaggggaccaccgtgaccgtgtctagcgcgtccggcggaggcggcagcgggggtcgggcatcagggggcggcggatcggacatccagctcacccagtccccgagctcgctgtccgcctccgtgggagatcgggtcaccatcacgtgccgcgccagccagtcgatttcctcctacctgaactggtaccaacagaagcccggaaaagccccgaagcttctcatctacgccgcctcgagcctgcagtcaggagtgccctcacggttctccggctccggttccggtactgatttcaccctgaccatttcctccctgcaaccggaggacttcgctacttactactgccagcagtcgtactccaccccctacactttcggacaaggcaccaaggtcgaaatcaagaccactaccccagcaccgaggccacccaccccggctcctaccatcgcctcccagcctctgtccctgcgtccggaggcatgtagacccgcagctggtggggccgtgcatacccggggtcttgacttcgcctgcgatatctacatttgggcccctctggctggtacttgcggggtcctgctgctttcactcgtgatcactctttactgtaagcgcggtcggaagaagctgctgtacatctttaagcaacccttcatgaggcctgtgcagactactcaagaggaggacggctgttcatgccggttcccagaggaggaggaaggcggctgcgaactgcgcgtgaaattcagccgcagcgcagatgctccagcctaccagcaggggcagaaccagctctacaacgaactcaatcttggtcggagagaggagtacgacgtgctggacaagcggagaggacgggacccagaaatgggcgggaagccgcgcagaaagaatccccaagagggcctgtacaacgagctccaaaaggataagatggcagaagcctatagcgagattggtatgaaaggggaacgcagaagaggcaaaggccacgacggactgtaccagggactcagcaccgccaccaaggacacctatgacgctcttcacatgcaggccctgccgcctcgg

SEQ ID NO: 1061 - DNA, 2226 bp, Artificial Sequence
  source: /note="Description of Artificial Sequence: Synthetic polynucleotide"
atggccctccctgtcaccgccctgctgcttccgctggctcttctgctccacgccgctcggccctcgttggcactttccctgactgccgaccagatggtgtccgcccttctggacgccgagcctccaattctgtactcggagtacgatccgactcgcccgttctccgaagccagcatgatgggcctgttgactaacctggcggaccgcgagttggtgcacatgattaactgggctaagcgggtgccgggcttcgtggacctgaccctgcacgaccaagtgcacctcctggaatgcgcctggatggaaatcctcatgatcggcctcgtgtggagatccatggagcatcccggaaagctcctgtttgcacccaacctcctgcttgatcgcaaccagggaaaatgcgtggaagggggtgtcgagattttcgacatgctgctcgccacctcttcccggttccggatgatgaatctgcagggagaagagttcgtgtgtctgaagtcaatcatcctgctgaactccggggtctataccttcctgagctcgaccctcaagtcactggaggaaaaagaccacatccatcgcgtgctcgataagatcaccgacacccttatccatctcatggcgaaggctggactgaccctgcaacagcagcaccagaggctggcccagttgctgctgattctgagccacatccggcacatgtcgaacaagaggatggaacacctgtacagcatgaagtgcaagaacgtcgtgcctctgtccgatctgctcctggaaatgctggacgcgcacagactcgggacgggagctgaagatccacgacccagcagaaagcgacgggaagtgcaattggtggaatcagggggaggacttgtgcagcctggaggatcgctgagactgtcatgtgccgtgtccggctttgccctgtccaaccacgggatgtcctgggtccgccgcgcgcctggaaagggcctcgaatgggtgtcgggtattgtgtacagcggtagcacctactatgccgcatccgtgaaggggagattcaccatcagccgggacaactccaggaacactctgtacctccaaatgaattcgctgaggccagaggacactgccatctactactgctccgcgcatggcggagagtccgacgtctggggacaggggaccaccgtgaccgtgtctagcgcgtccggcggaggcggcagcgggggtcgggcatcagggggcggcggatcggacatccagctcacccagtccccgagctcgctgtccgcctccgtgggagatcgggtcaccatcacgtgccgcgccagccagtcgatttcctcctacctgaactggtaccaacagaagcccggaaaagccccgaagcttctcatctacgccgcctcgagcctgcagtcaggagtgccctcacggttctccggctccggttccggtactgatttcaccctgaccatttcctccctgcaaccggaggacttcgctacttactactgccagcagtcgtactccaccccctacactttcggacaaggcaccaaggtcgaaatcaagaccactaccccagcaccgaggccacccaccccggctcctaccatcgcctcccagcctctgtccctgcgtccggaggcatgtagacccgcagctggtggggccgtgcatacccggggtcttgacttcgcctgcgatatctacatttgggcccctctggctggtacttgcggggtcctgctgctttcactcgtgatcactctttactgtaagcgcggtcggaagaagctgctgtacatctttaagcaacccttcatgaggcctgtgcagactactcaagaggaggacggctgttcatgccggttcccagaggaggaggaaggcggctgcgaactgcgcgtgaaattcagccgcagcgcagatgctccagcctaccagcaggggcagaaccagctctacaacgaactcaatcttggtcggagagaggagtacgacgtgctggacaagcggagaggacgggacccagaaatgggcgggaagccgcgcagaaagaatccccaagagggcctgtacaacgagctccaaaaggataagatggcagaagcctatagcgagattggtatgaaaggggaacgcagaagaggcaaaggccacgacggactgtaccagggactcagcaccgccaccaaggacacctatgacgctcttcacatgcaggccctgccgcctcgg

SEQ ID NO: 1062 - DNA, 2256 bp, Artificial Sequence
  source: /note="Description of Artificial Sequence: Synthetic polynucleotide"
atggccctccctgtcaccgccctgctgcttccgctggctcttctgctccacgccgctcggcccgattcgttggcactttccctgactgccgaccagatggtgtccgcccttctggacgccgagcctccaattctgtactcggagtacgatccgactcgcccgttctccgaagccagcatgatgggcctgttgactaacctggcggaccgcgagttggtgcacatgattaactgggctaagcgggtgccgggcttcgtggacctggccctgcacgaccaagtgcacctcctggaatgcgcctggatggaaatcctcatgatcggcctcgtgtggagatccatggagcatcccggaaagctcctgtttgcacccaacctcctgcttgatcgcaaccagggaaaatgcgtggaagggggtgtcgagattttcgacatgctgctcgccacctcttcccggttccggatgatgaatctgcagggagaagagttcgtgtgtctgaagtcaatcatcctgctgaactccggggtctataccttcctgagctcgaccctcaagtcactggaggaaaaagaccacatccatcgcgtgctcgataagatcaccgacacccttatccatctcatggcgaaggctggactgaccctgcaacagcagcaccagaggctggcccagttgctgctgattctgagccacatccggcacatgtcgtccaagaggatggaacacctgtacagcatgaagtgcaagaacgtcgtgcctctgtccgatctgctcctggaaatgctggacgcgcacagactcggaaccggcgcggaagacccccggccctccaggaagcgaaggtccctcggagacgtgggtgaaattgtgatgacccagtcacccgccactcttagcctttcacccggtgagcgcgcaaccctgtcttgcagagcctcccaagacatctcaaaataccttaattggtatcaacagaagcccggacaggctcctcgccttctgatctaccacaccagccggctccattctggaatccctgccaggttcagcggtagcggatctgggaccgactacaccctcactatcagctcactgcagccagaggacttcgctgtctatttctgtcagcaagggaacaccctgccctacacctttggacagggcaccaagctcgagattaaaggtggaggtggcagcggaggaggtgggtccggcggtggaggaagccaggtccaactccaagaaagcggaccgggtcttgtgaagccatcagaaactctttcactgacttgtactgtgagcggagtgtctctccccgattacggggtgtcttggatcagacagccaccggggaagggtctggaatggattggagtgatttggggctctgagactacttactactcttcatccctcaagtcacgcgtcaccatctcaaaggacaactctaagaatcaggtgtcactgaaactgtcatctgtgaccgcagccgacaccgccgtgtactattgcgctaagcattactattatggcgggagctacgcaatggattactggggacagggtactctggtcaccgtgtccagcaccactaccccagcaccgaggccacccaccccggctcctaccatcgcctcccagcctctgtccctgcgtccggaggcatgtagacccgcagctggtggggccgtgcatacccggggtcttgacttcgcctgcgatatctacatttgggcccctctggctggtacttgcggggtcctgctgctttcactcgtgatcactctttactgtaagcgcggtcggaagaagctgctgtacatctttaagcaacccttcatgaggcctgtgcagactactcaagaggaggacggctgttcatgccggttcccagaggaggaggaaggcggctgcgaactgcgcgtgaaattcagccgcagcgcagatgctccagcctaccagcaggggcagaaccagctctacaacgaactcaatcttggtcggagagaggagtacgacgtgctggacaagcggagaggacgggacccagaaatgggcgggaagccgcgcagaaagaatccccaagagggcctgtacaacgagctccaaaaggataagatggcagaagcctatagcgagattggtatgaaaggggaacgcagaagaggcaaaggccacgacggactgtaccagggactcagcaccgccaccaaggacacctatgacgctcttcacatgcaggccctgccgcctcgg

SEQ ID NO: 1063 - DNA, 2256 bp, Artificial Sequence
  source: /note="Description of Artificial Sequence: Synthetic polynucleotide"
atggccctccctgtcaccgccctgctgcttccgctggctcttctgctccacgccgctcggcccgattcgttggcactttccctgactgccgaccagatggtgtccgcccttctggacgccgagcctccaattctgtactcggagtacgatccgactcgcccgttctccgaagccagcatgatgggcctgttgactaacctggcggaccgcgagttggtgcacatgattaactgggctaagcgggtgccgggcttcgtggacctgaccctgcacgaccaagtgcacctcctggaatgcgcctggatggaaatcctcatgatcggcctcgtgtggagatccatggagcatcccggaaagctcctgtttgcacccaacctcctgcttgatcgcaaccagggaaaatgcgtggaagggggtgtcgagattttcgacatgctgctcgccacctcttcccggttccggatgatgaatctgcagggagaagagttcgtgtgtctgaagtcaatcatcctgctgaactccggggtctataccttcctgagctcgaccctcaagtcactggaggaaaaagaccacatccatcgcgtgctcgataagatcaccgacacccttatccatctcatggcgaaggctggactgaccctgcaacagcagcaccagaggctggcccagttgctgctgattctgagccacatccggcacatgtcgaacaagaggatggaacacctgtacagcatgaagtgcaagaacgtcgtgcctctgtccgatctgctcctggaaatgctggacgcgcacagactcggaaccggcgcggaagacccccggccctccaggaagcgaaggtccctcggagacgtgggtgaaattgtgatgacccagtcacccgccactcttagcctttcacccggtgagcgcgcaaccctgtcttgcagagcctcccaagacatctcaaaataccttaattggtatcaacagaagcccggacaggctcctcgccttctgatctaccacaccagccggctccattctggaatccctgccaggttcagcggtagcggatctgggaccgactacaccctcactatcagctcactgcagccagaggacttcgctgtctatttctgtcagcaagggaacaccctgccctacacctttggacagggcaccaagctcgagattaaaggtggaggtggcagcggaggaggtgggtccggcggtggaggaagccaggtccaactccaagaaagcggaccgggtcttgtgaagccatcagaaactctttcactgacttgtactgtgagcggagtgtctctccccgattacggggtgtcttggatcagacagccaccggggaagggtctggaatggattggagtgatttggggctctgagactacttactactcttcatccctcaagtcacgcgtcaccatctcaaaggacaactctaagaatcaggtgtcactgaaactgtcatctgtgaccgcagccgacaccgccgtgtactattgcgctaagcattactattatggcgggagctacgcaatggattactggggacagggtactctggtcaccgtgtccagcaccactaccccagcaccgaggccacccaccccggctcctaccatcgcctcccagcctctgtccctgcgtccggaggcatgtagacccgcagctggtggggccgtgcatacccggggtcttgacttcgcctgcgatatctacatttgggcccctctggctggtacttgcggggtcctgctgctttcactcgtgatcactctttactgtaagcgcggtcggaagaagctgctgtacatctttaagcaacccttcatgaggcctgtgcagactactcaagaggaggacggctgttcatgccggttcccagaggaggaggaaggcggctgcgaactgcgcgtgaaattcagccgcagcgcagatgctccagcctaccagcaggggcagaaccagctctacaacgaactcaatcttggtcggagagaggagtacgacgtgctggacaagcggagaggacgggacccagaaatgggcgggaagccgcgcagaaagaatccccaagagggcctgtacaacgagctccaaaaggataagatggcagaagcctatagcgagattggtatgaaaggggaacgcagaagaggcaaaggccacgacggactgtaccagggactcagcaccgccaccaaggacacctatgacgctcttcacatgcaggccctgccgcctcgg

SEQ ID NO: 1064 - DNA, 2238 bp, Artificial Sequence
  source: /note="Description of Artificial Sequence: Synthetic polynucleotide"
atggccctccctgtcaccgccctgctgcttccgctggctcttctgctccacgccgctcggcccgattcgttggcactttccctgactgccgaccagatggtgtccgcccttctggacgccgagcctccaattctgtactcggagtacgatccgactcgcccgttctccgaagccagcatgatgggcctgttgactaacctggcggaccgcgagttggtgcacatgattaactgggctaagcgggtgccgggcttcgtggacctggccctgcacgaccaagtgcacctcctggaatgcgcctggatggaaatcctcatgatcggcctcgtgtggagatccatggagcatcccggaaagctcctgtttgcacccaacctcctgcttgatcgcaaccagggaaaatgcgtggaagggggtgtcgagattttcgacatgctgctcgccacctcttcccggttccggatgatgaatctgcagggagaagagttcgtgtgtctgaagtcaatcatcctgctgaactccggggtctataccttcctgagctcgaccctcaagtcactggaggaaaaagaccacatccatcgcgtgctcgataagatcaccgacacccttatccatctcatggcgaaggctggactgaccctgcaacagcagcaccagaggctggcccagttgctgctgattctgagccacatccggcacatgtcgtccaagaggatggaacacctgtacagcatgaagtgcaagaacgtcgtgcctctgtccgatctgctcctggaaatgctggacgcgcacagactcgggacgggagctgaagatccacgacccagcagaaagcgacgggaaattgtgatgacccagtcacccgccactcttagcctttcacccggtgagcgcgcaaccctgtcttgcagagcctcccaagacatctcaaaataccttaattggtatcaacagaagcccggacaggctcctcgccttctgatctaccacaccagccggctccattctggaatccctgccaggttcagcggtagcggatctgggaccgactacaccctcactatcagctcactgcagccagaggacttcgctgtctatttctgtcagcaagggaacaccctgccctacacctttggacagggcaccaagctcgagattaaaggtggaggtggcagcggaggaggtgggtccggcggtggaggaagccaggtccaactccaagaaagcggaccgggtcttgtgaagccatcagaaactctttcactgacttgtactgtgagcggagtgtctctccccgattacggggtgtcttggatcagacagccaccggggaagggtctggaatggattggagtgatttggggctctgagactacttactactcttcatccctcaagtcacgcgtcaccatctcaaaggacaactctaagaatcaggtgtcactgaaactgtcatctgtgaccgcagccgacaccgccgtgtactattgcgctaagcattactattatggcgggagctacgcaatggattactggggacagggtactctggtcaccgtgtccagcaccactaccccagcaccgaggccacccaccccggctcctaccatcgcctcccagcctctgtccctgcgtccggaggcatgtagacccgcagctggtggggccgtgcatacccggggtcttgacttcgcctgcgatatctacatttgggcccctctggctggtacttgcggggtcctgctgctttcactcgtgatcactctttactgtaagcgcggtcggaagaagctgctgtacatctttaagcaacccttcatgaggcctgtgcagactactcaagaggaggacggctgttcatgccggttcccagaggaggaggaaggcggctgcgaactgcgcgtgaaattcagccgcagcgcagatgctccagcctaccagcaggggcagaaccagctctacaacgaactcaatcttggtcggagagaggagtacgacgtgctggacaagcggagaggacgggacccagaaatgggcgggaagccgcgcagaaagaatccccaagagggcctgtacaacgagctccaaaaggataagatggcagaagcctatagcgagattggtatgaaaggggaacgcagaagaggcaaaggccacgacggactgtaccagggactcagcaccgccaccaaggacacctatgacgctcttcacatgcaggccctgccgcctcgg

SEQ ID NO: 1065 - DNA, 2238 bp, Artificial Sequence
  source: /note="Description of Artificial Sequence: Synthetic polynucleotide"
atggccctccctgtcaccgccctgctgcttccgctggctcttctgctccacgccgctcggcccgattcgttggcactttccctgactgccgaccagatggtgtccgcccttctggacgccgagcctccaattctgtactcggagtacgatccgactcgcccgttctccgaagccagcatgatgggcctgttgactaacctggcggaccgcgagttggtgcacatgattaactgggctaagcgggtgccgggcttcgtggacctgaccctgcacgaccaagtgcacctcctggaatgcgcctggatggaaatcctcatgatcggcctcgtgtggagatccatggagcatcccggaaagctcctgtttgcacccaacctcctgcttgatcgcaaccagggaaaatgcgtggaagggggtgtcgagattttcgacatgctgctcgccacctcttcccggttccggatgatgaatctgcagggagaagagttcgtgtgtctgaagtcaatcatcctgctgaactccggggtctataccttcctgagctcgaccctcaagtcactggaggaaaaagaccacatccatcgcgtgctcgataagatcaccgacacccttatccatctcatggcgaaggctggactgaccctgcaacagcagcaccagaggctggcccagttgctgctgattctgagccacatccggcacatgtcgaacaagaggatggaacacctgtacagcatgaagtgcaagaacgtcgtgcctctgtccgatctgctcctggaaatgctggacgcgcacagactcgggacgggagctgaagatccacgacccagcagaaagcgacgggaaattgtgatgacccagtcacccgccactcttagcctttcacccggtgagcgcgcaaccctgtcttgcagagcctcccaagacatctcaaaataccttaattggtatcaacagaagcccggacaggctcctcgccttctgatctaccacaccagccggctccattctggaatccctgccaggttcagcggtagcggatctgggaccgactacaccctcactatcagctcactgcagccagaggacttcgctgtctatttctgtcagcaagggaacaccctgccctacacctttggacagggcaccaagctcgagattaaaggtggaggtggcagcggaggaggtgggtccggcggtggaggaagccaggtccaactccaagaaagcggaccgggtcttgtgaagccatcagaaactctttcactgacttgtactgtgagcggagtgtctctccccgattacggggtgtcttggatcagacagccaccggggaagggtctggaatggattggagtgatttggggctctgagactacttactactcttcatccctcaagtcacgcgtcaccatctcaaaggacaactctaagaatcaggtgtcactgaaactgtcatctgtgaccgcagccgacaccgccgtgtactattgcgctaagcattactattatggcgggagctacgcaatggattactggggacagggtactctggtcaccgtgtccagcaccactaccccagcaccgaggccacccaccccggctcctaccatcgcctcccagcctctgtccctgcgtccggaggcatgtagacccgcagctggtggggccgtgcatacccggggtcttgacttcgcctgcgatatctacatttgggcccctctggctggtacttgcggggtcctgctgctttcactcgtgatcactctttactgtaagcgcggtcggaagaagctgctgtacatctttaagcaacccttcatgaggcctgtgcagactactcaagaggaggacggctgttcatgccggttcccagaggaggaggaaggcggctgcgaactgcgcgtgaaattcagccgcagcgcagatgctccagcctaccagcaggggcagaaccagctctacaacgaactcaatcttggtcggagagaggagtacgacgtgctggacaagcggagaggacgggacccagaaatgggcgggaagccgcgcagaaagaatccccaagagggcctgtacaacgagctccaaaaggataagatggcagaagcctatagcgagattggtatgaaaggggaacgcagaagaggcaaaggccacgacggactgtaccagggactcagcaccgccaccaaggacacctatgacgctcttcacatgcaggccctgccgcctcgg

SEQ ID NO: 1066 - DNA, 2259 bp, Artificial Sequence
  source: /note="Description of Artificial Sequence: Synthetic polynucleotide"
atggccctccctgtcaccgccctgctgcttccgctggctcttctgctccacgccgctcggcccgattcgttggcactttccctgactgccgaccagatggtgtccgcccttctggacgccgagcctccaattctgtactcggagtacgatccgactcgcccgttctccgaagccagcatgatgggcctgttgactaacctggcggaccgcgagttggtgcacatgattaactgggctaagcgggtgccgggcttcgtggacctggccctgcacgaccaagtgcacctcctggaatgcgcctggatggaaatcctcatgatcggcctcgtgtggagatccatggagcatcccggaaagctcctgtttgcacccaacctcctgcttgatcgcaaccagggaaaatgcgtggaagggggtgtcgagattttcgacatgctgctcgccacctcttcccggttccggatgatgaatctgcagggagaagagttcgtgtgtctgaagtcaatcatcctgctgaactccggggtctataccttcctgagctcgaccctcaagtcactggaggaaaaagaccacatccatcgcgtgctcgataagatcaccgacacccttatccatctcatggcgaaggctggactgaccctgcaacagcagcaccagaggctggcccagttgctgctgattctgagccacatccggcacatgtcgtccaagaggatggaacacctgtacagcatgaagtgcaagaacgtcgtgcctctgtccgatctgctcctggaaatgctggacgcgcacagactcggaaccggcgcggaagacccccggccctccaggaagcgaaggtccctcggagacgtgggtcaagtgcaactcgtccaaagcggagcggaagtcaagaaacccggagcgagcgtgaaagtgtcctgcaaagcctccggctacacctttacgggctactacatgcactgggtgcgccaggcaccaggacagggtcttgaatggatgggatggatcaaccctaattcgggcggaactaactacgcacagaagttccaggggagagtgactctgactcgggatacctccatctcaactgtctacatggaactctcccgcttgcggtcagatgatacggcagtgtactactgcgcccgcgacatgaatatcctggctaccgtgccgttcgacatctggggacaggggactatggttactgtctcatcgggcggtggaggttcaggaggaggcggctcgggaggcggaggttcggacattcagatgacccagtccccatcctctctgtcggccagcgtcggagatagggtgaccattacctgtcgggcctcgcaaagcatctcctcgtacctcaactggtatcagcaaaagccgggaaaggcgcctaagctgctgatctacgccgcttcgagcttgcaaagcggggtgccatccagattctcgggatcaggctcaggaaccgacttcaccctgaccgtgaacagcctccagccggaggactttgccacttactactgccagcagggagactccgtgccgcttactttcggggggggtacccgcctggagatcaagaccactaccccagcaccgaggccacccaccccggctcctaccatcgcctcccagcctctgtccctgcgtccggaggcatgtagacccgcagctggtggggccgtgcatacccggggtcttgacttcgcctgcgatatctacatttgggcccctctggctggtacttgcggggtcctgctgctttcactcgtgatcactctttactgtaagcgcggtcggaagaagctgctgtacatctttaagcaacccttcatgaggcctgtgcagactactcaagaggaggacggctgttcatgccggttcccagaggaggaggaaggcggctgcgaactgcgcgtgaaattcagccgcagcgcagatgctccagcctaccagcaggggcagaaccagctctacaacgaactcaatcttggtcggagagaggagtacgacgtgctggacaagcggagaggacgggacccagaaatgggcgggaagccgcgcagaaagaatccccaagagggcctgtacaacgagctccaaaaggataagatggcagaagcctatagcgagattggtatgaaaggggaacgcagaagaggcaaaggccacgacggactgtaccagggactcagcaccgccaccaaggacacctatgacgctcttcacatgcaggccctgccgcctcgg

SEQ ID NO: 1067 - DNA, 2259 bp, Artificial Sequence
  source: /note="Description of Artificial Sequence: Synthetic polynucleotide"
atggccctccctgtcaccgccctgctgcttccgctggctcttctgctccacgccgctcggcccgattcgttggcactttccctgactgccgaccagatggtgtccgcccttctggacgccgagcctccaattctgtactcggagtacgatccgactcgcccgttctccgaagccagcatgatgggcctgttgactaacctggcggaccgcgagttggtgcacatgattaactgggctaagcgggtgccgggcttcgtggacctgaccctgcacgaccaagtgcacctcctggaatgcgcctggatggaaatcctcatgatcggcctcgtgtggagatccatggagcatcccggaaagctcctgtttgcacccaacctcctgcttgatcgcaaccagggaaaatgcgtggaagggggtgtcgagattttcgacatgctgctcgccacctcttcccggttccggatgatgaatctgcagggagaagagttcgtgtgtctgaagtcaatcatcctgctgaactccggggtctataccttcctgagctcgaccctcaagtcactggaggaaaaagaccacatccatcgcgtgctcgataagatcaccgacacccttatccatctcatggcgaaggctggactgaccctgcaacagcagcaccagaggctggcccagttgctgctgattctgagccacatccggcacatgtcgaacaagaggatggaacacctgtacagcatgaagtgcaagaacgtcgtgcctctgtccgatctgctcctggaaatgctggacgcgcacagactcggaaccggcgcggaagacccccggccctccaggaagcgaaggtccctcggagacgtgggtcaagtgcaactcgtccaaagcggagcggaagtcaagaaacccggagcgagcgtgaaagtgtcctgcaaagcctccggctacacctttacgggctactacatgcactgggtgcgccaggcaccaggacagggtcttgaatggatgggatggatcaaccctaattcgggcggaactaactacgcacagaagttccaggggagagtgactctgactcgggatacctccatctcaactgtctacatggaactctcccgcttgcggtcagatgatacggcagtgtactactgcgcccgcgacatgaatatcctggctaccgtgccgttcgacatctggggacaggggactatggttactgtctcatcgggcggtggaggttcaggaggaggcggctcgggaggcggaggttcggacattcagatgacccagtccccatcctctctgtcggccagcgtcggagatagggtgaccattacctgtcgggcctcgcaaagcatctcctcgtacctcaactggtatcagcaaaagccgggaaaggcgcctaagctgctgatctacgccgcttcgagcttgcaaagcggggtgccatccagattctcgggatcaggctcaggaaccgacttcaccctgaccgtgaacagcctccagccggaggactttgccacttactactgccagcagggagactccgtgccgcttactttcggggggggtacccgcctggagatcaagaccactaccccagcaccgaggccacccaccccggctcctaccatcgcctcccagcctctgtccctgcgtccggaggcatgtagacccgcagctggtggggccgtgcatacccggggtcttgacttcgcctgcgatatctacatttgggcccctctggctggtacttgcggggtcctgctgctttcactcgtgatcactctttactgtaagcgcggtcggaagaagctgctgtacatctttaagcaacccttcatgaggcctgtgcagactactcaagaggaggacggctgttcatgccggttcccagaggaggaggaaggcggctgcgaactgcgcgtgaaattcagccgcagcgcagatgctccagcctaccagcaggggcagaaccagctctacaacgaactcaatcttggtcggagagaggagtacgacgtgctggacaagcggagaggacgggacccagaaatgggcgggaagccgcgcagaaagaatccccaagagggcctgtacaacgagctccaaaaggataagatggcagaagcctatagcgagattggtatgaaaggggaacgcagaagaggcaaaggccacgacggactgtaccagggactcagcaccgccaccaaggacacctatgacgctcttcacatgcaggccctgccgcctcgg

SEQ ID NO: 1068 - DNA, 2241 bp, Artificial Sequence
  source: /note="Description of Artificial Sequence: Synthetic polynucleotide"
atggccctccctgtcaccgccctgctgcttccgctggctcttctgctccacgccgctcggcccgattcgttggcactttccctgactgccgaccagatggtgtccgcccttctggacgccgagcctccaattctgtactcggagtacgatccgactcgcccgttctccgaagccagcatgatgggcctgttgactaacctggcggaccgcgagttggtgcacatgattaactgggctaagcgggtgccgggcttcgtggacctggccctgcacgaccaagtgcacctcctggaatgcgcctggatggaaatcctcatgatcggcctcgtgtggagatccatggagcatcccggaaagctcctgtttgcacccaacctcctgcttgatcgcaaccagggaaaatgcgtggaagggggtgtcgagattttcgacatgctgctcgccacctcttcccggttccggatgatgaatctgcagggagaagagttcgtgtgtctgaagtcaatcatcctgctgaactccggggtctataccttcctgagctcgaccctcaagtcactggaggaaaaagaccacatccatcgcgtgctcgataagatcaccgacacccttatccatctcatggcgaaggctggactgaccctgcaacagcagcaccagaggctggcccagttgctgctgattctgagccacatccggcacatgtcgtccaagaggatggaacacctgtacagcatgaagtgcaagaacgtcgtgcctctgtccgatctgctcctggaaatgctggacgcgcacagactcggaaccggcgcggaagacccccggccctccaggaagcgaaggcaagtgcaactcgtccaaagcggagcggaagtcaagaaacccggagcgagcgtgaaagtgtcctgcaaagcctccggctacacctttacgggctactacatgcactgggtgcgccaggcaccaggacagggtcttgaatggatgggatggatcaaccctaattcgggcggaactaactacgcacagaagttccaggggagagtgactctgactcgggatacctccatctcaactgtctacatggaactctcccgcttgcggtcagatgatacggcagtgtactactgcgcccgcgacatgaatatcctggctaccgtgccgttcgacatctggggacaggggactatggttactgtctcatcgggcggtggaggttcaggaggaggcggctcgggaggcggaggttcggacattcagatgacccagtccccatcctctctgtcggccagcgtcggagatagggtgaccattacctgtcgggcctcgcaaagcatctcctcgtacctcaactggtatcagcaaaagccgggaaaggcgcctaagctgctgatctacgccgcttcgagcttgcaaagcggggtgccatccagattctcgggatcaggctcaggaaccgacttcaccctgaccgtgaacagcctccagccggaggactttgccacttactactgccagcagggagactccgtgccgcttactttcggggggggtacccgcctggagatcaagaccactaccccagcaccgaggccacccaccccggctcctaccatcgcctcccagcctctgtccctgcgtccggaggcatgtagacccgcagctggtggggccgtgcatacccggggtcttgacttcgcctgcgatatctacatttgggcccctctggctggtacttgcggggtcctgctgctttcactcgtgatcactctttactgtaagcgcggtcggaagaagctgctgtacatctttaagcaacccttcatgaggcctgtgcagactactcaagaggaggacggctgttcatgccggttcccagaggaggaggaaggcggctgcgaactgcgcgtgaaattcagccgcagcgcagatgctccagcctaccagcaggggcagaaccagctctacaacgaactcaatcttggtcggagagaggagtacgacgtgctggacaagcggagaggacgggacccagaaatgggcgggaagccgcgcagaaagaatccccaagagggcctgtacaacgagctccaaaaggataagatggcagaagcctatagcgagattggtatgaaaggggaacgcagaagaggcaaaggccacgacggactgtaccagggactcagcaccgccaccaaggacacctatgacgctcttcacatgcaggccctgccgcctcgg

SEQ ID NO: 1069 - DNA, 2241 bp, Artificial Sequence
  source: /note="Description of Artificial Sequence: Synthetic polynucleotide"
atggccctccctgtcaccgccctgctgcttccgctggctcttctgctccacgccgctcggcccgattcgttggcactttccctgactgccgaccagatggtgtccgcccttctggacgccgagcctccaattctgtactcggagtacgatccgactcgcccgttctccgaagccagcatgatgggcctgttgactaacctggcggaccgcgagttggtgcacatgattaactgggctaagcgggtgccgggcttcgtggacctgaccctgcacgaccaagtgcacctcctggaatgcgcctggatggaaatcctcatgatcggcctcgtgtggagatccatggagcatcccggaaagctcctgtttgcacccaacctcctgcttgatcgcaaccagggaaaatgcgtggaagggggtgtcgagattttcgacatgctgctcgccacctcttcccggttccggatgatgaatctgcagggagaagagttcgtgtgtctgaagtcaatcatcctgctgaactccggggtctataccttcctgagctcgaccctcaagtcactggaggaaaaagaccacatccatcgcgtgctcgataagatcaccgacacccttatccatctcatggcgaaggctggactgaccctgcaacagcagcaccagaggctggcccagttgctgctgattctgagccacatccggcacatgtcgaacaagaggatggaacacctgtacagcatgaagtgcaagaacgtcgtgcctctgtccgatctgctcctggaaatgctggacgcgcacagactcgggacgggagctgaagatccacgacccagcagaaagcgacggcaagtgcaactcgtccaaagcggagcggaagtcaagaaacccggagcgagcgtgaaagtgtcctgcaaagcctccggctacacctttacgggctactacatgcactgggtgcgccaggcaccaggacagggtcttgaatggatgggatggatcaaccctaattcgggcggaactaactacgcacagaagttccaggggagagtgactctgactcgggatacctccatctcaactgtctacatggaactctcccgcttgcggtcagatgatacggcagtgtactactgcgcccgcgacatgaatatcctggctaccgtgccgttcgacatctggggacaggggactatggttactgtctcatcgggcggtggaggttcaggaggaggcggctcgggaggcggaggttcggacattcagatgacccagtccccatcctctctgtcggccagcgtcggagatagggtgaccattacctgtcgggcctcgcaaagcatctcctcgtacctcaactggtatcagcaaaagccgggaaaggcgcctaagctgctgatctacgccgcttcgagcttgcaaagcggggtgccatccagattctcgggatcaggctcaggaaccgacttcaccctgaccgtgaacagcctccagccggaggactttgccacttactactgccagcagggagactccgtgccgcttactttcggggggggtacccgcctggagatcaagaccactaccccagcaccgaggccacccaccccggctcctaccatcgcctcccagcctctgtccctgcgtccggaggcatgtagacccgcagctggtggggccgtgcatacccggggtcttgacttcgcctgcgatatctacatttgggcccctctggctggtacttgcggggtcctgctgctttcactcgtgatcactctttactgtaagcgcggtcggaagaagctgctgtacatctttaagcaacccttcatgaggcctgtgcagactactcaagaggaggacggctgttcatgccggttcccagaggaggaggaaggcggctgcgaactgcgcgtgaaattcagccgcagcgcagatgctccagcctaccagcaggggcagaaccagctctacaacgaactcaatcttggtcggagagaggagtacgacgtgctggacaagcggagaggacgggacccagaaatgggcgggaagccgcgcagaaagaatccccaagagggcctgtacaacgagctccaaaaggataagatggcagaagcctatagcgagattggtatgaaaggggaacgcagaagaggcaaaggccacgacggactgtaccagggactcagcaccgccaccaaggacacctatgacgctcttcacatgcaggccctgccgcctcgg

SEQ ID NO: 1070 - DNA, 2247 bp, Artificial Sequence
  source: /note="Description of Artificial Sequence: Synthetic polynucleotide"
atggccctccctgtcaccgccctgctgcttccgctggctcttctgctccacgccgctcggcccgattcgttggcactttccctgactgccgaccagatggtgtccgcccttctggacgccgagcctccaattctgtactcggagtacgatccgactcgcccgttctccgaagccagcatgatgggcctgttgactaacctggcggaccgcgagttggtgcacatgattaactgggctaagcgggtgccgggcttcgtggacctggccctgcacgaccaagtgcacctcctggaatgcgcctggatggaaatcctcatgatcggcctcgtgtggagatccatggagcatcccggaaagctcctgtttgcacccaacctcctgcttgatcgcaaccagggaaaatgcgtggaagggggtgtcgagattttcgacatgctgctcgccacctcttcccggttccggatgatgaatctgcagggagaagagttcgtgtgtctgaagtcaatcatcctgctgaactccggggtctataccttcctgagctcgaccctcaagtcactggaggaaaaagaccacatccatcgcgtgctcgataagatcaccgacacccttatccatctcatggcgaaggctggactgaccctgcaacagcagcaccagaggctggcccagttgctgctgattctgagccacatccggcacatgtcgtccaagaggatggaacacctgtacagcatgaagtgcaagaacgtcgtgcctctgtccgatctgctcctggaaatgctggacgcgcacagactcggaaccggcgcggaagacccccggccctccaggaagcgaaggtccctcggagacgtgggtgaagtgcaattggtggaatcagggggaggacttgtgcagcctggaggatcgctgagactgtcatgtgccgtgtccggctttgccctgtccaaccacgggatgtcctgggtccgccgcgcgcctggaaagggcctcgaatgggtgtcgggtattgtgtacagcggtagcacctactatgccgcatccgtgaaggggagattcaccatcagccgggacaactccaggaacactctgtacctccaaatgaattcgctgaggccagaggacactgccatctactactgctccgcgcatggcggagagtccgacgtctggggacaggggaccaccgtgaccgtgtctagcgcgtccggcggaggcggcagcgggggtcgggcatcagggggcggcggatcggacatccagctcacccagtccccgagctcgctgtccgcctccgtgggagatcgggtcaccatcacgtgccgcgccagccagtcgatttcctcctacctgaactggtaccaacagaagcccggaaaagccccgaagcttctcatctacgccgcctcgagcctgcagtcaggagtgccctcacggttctccggctccggttccggtactgatttcaccctgaccatttcctccctgcaaccggaggacttcgctacttactactgccagcagtcgtactccaccccctacactttcggacaaggcaccaaggtcgaaatcaagaccactaccccagcaccgaggccacccaccccggctcctaccatcgcctcccagcctctgtccctgcgtccggaggcatgtagacccgcagctggtggggccgtgcatacccggggtcttgacttcgcctgcgatatctacatttgggcccctctggctggtacttgcggggtcctgctgctttcactcgtgatcactctttactgtaagcgcggtcggaagaagctgctgtacatctttaagcaacccttcatgaggcctgtgcagactactcaagaggaggacggctgttcatgccggttcccagaggaggaggaaggcggctgcgaactgcgcgtgaaattcagccgcagcgcagatgctccagcctaccagcaggggcagaaccagctctacaacgaactcaatcttggtcggagagaggagtacgacgtgctggacaagcggagaggacgggacccagaaatgggcgggaagccgcgcagaaagaatccccaagagggcctgtacaacgagctccaaaaggataagatggcagaagcctatagcgagattggtatgaaaggggaacgcagaagaggcaaaggccacgacggactgtaccagggactcagcaccgccaccaaggacacctatgacgctcttcacatgcaggccctgccgcctcgg

SEQ ID NO: 1071 - DNA, 2247 bp, Artificial Sequence
  source: /note="Description of Artificial Sequence: Synthetic polynucleotide"
atggccctccctgtcaccgccctgctgcttccgctggctcttctgctccacgccgctcggcccgattcgttggcactttccctgactgccgaccagatggtgtccgcccttctggacgccgagcctccaattctgtactcggagtacgatccgactcgcccgttctccgaagccagcatgatgggcctgttgactaacctggcggaccgcgagttggtgcacatgattaactgggctaagcgggtgccgggcttcgtggacctgaccctgcacgaccaagtgcacctcctggaatgcgcctggatggaaatcctcatgatcggcctcgtgtggagatccatggagcatcccggaaagctcctgtttgcacccaacctcctgcttgatcgcaaccagggaaaatgcgtggaagggggtgtcgagattttcgacatgctgctcgccacctcttcccggttccggatgatgaatctgcagggagaagagttcgtgtgtctgaagtcaatcatcctgctgaactccggggtctataccttcctgagctcgaccctcaagtcactggaggaaaaagaccacatccatcgcgtgctcgataagatcaccgacacccttatccatctcatggcgaaggctggactgaccctgcaacagcagcaccagaggctggcccagttgctgctgattctgagccacatccggcacatgtcgaacaagaggatggaacacctgtacagcatgaagtgcaagaacgtcgtgcctctgtccgatctgctcctggaaatgctggacgcgcacagactcggaaccggcgcggaagacccccggccctccaggaagcgaaggtccctcggagacgtgggtgaagtgcaattggtggaatcagggggaggacttgtgcagcctggaggatcgctgagactgtcatgtgccgtgtccggctttgccctgtccaaccacgggatgtcctgggtccgccgcgcgcctggaaagggcctcgaatgggtgtcgggtattgtgtacagcggtagcacctactatgccgcatccgtgaaggggagattcaccatcagccgggacaactccaggaacactctgtacctccaaatgaattcgctgaggccagaggacactgccatctactactgctccgcgcatggcggagagtccgacgtctggggacaggggaccaccgtgaccgtgtctagcgcgtccggcggaggcggcagcgggggtcgggcatcagggggcggcggatcggacatccagctcacccagtccccgagctcgctgtccgcctccgtgggagatcgggtcaccatcacgtgccgcgccagccagtcgatttcctcctacctgaactggtaccaacagaagcccggaaaagccccgaagcttctcatctacgccgcctcgagcctgcagtcaggagtgccctcacggttctccggctccggttccggtactgatttcaccctgaccatttcctccctgcaaccggaggacttcgctacttactactgccagcagtcgtactccaccccctacactttcggacaaggcaccaaggtcgaaatcaagaccactaccccagcaccgaggccacccaccccggctcctaccatcgcctcccagcctctgtccctgcgtccggaggcatgtagacccgcagctggtggggccgtgcatacccggggtcttgacttcgcctgcgatatctacatttgggcccctctggctggtacttgcggggtcctgctgctttcactcgtgatcactctttactgtaagcgcggtcggaagaagctgctgtacatctttaagcaacccttcatgaggcctgtgcagactactcaagaggaggacggctgttcatgccggttcccagaggaggaggaaggcggctgcgaactgcgcgtgaaattcagccgcagcgcagatgctccagcctaccagcaggggcagaaccagctctacaacgaactcaatcttggtcggagagaggagtacgacgtgctggacaagcggagaggacgggacccagaaatgggcgggaagccgcgcagaaagaatccccaagagggcctgtacaacgagctccaaaaggataagatggcagaagcctatagcgagattggtatgaaaggggaacgcagaagaggcaaaggccacgacggactgtaccagggactcagcaccgccaccaaggacacctatgacgctcttcacatgcaggccctgccgcctcgg

SEQ ID NO: 1072 - DNA, 2229 bp, Artificial Sequence
  source: /note="Description of Artificial Sequence: Synthetic polynucleotide"
atggccctccctgtcaccgccctgctgcttccgctggctcttctgctccacgccgctcggcccgattcgttggcactttccctgactgccgaccagatggtgtccgcccttctggacgccgagcctccaattctgtactcggagtacgatccgactcgcccgttctccgaagccagcatgatgggcctgttgactaacctggcggaccgcgagttggtgcacatgattaactgggctaagcgggtgccgggcttcgtggacctggccctgcacgaccaagtgcacctcctggaatgcgcctggatggaaatcctcatgatcggcctcgtgtggagatccatggagcatcccggaaagctcctgtttgcacccaacctcctgcttgatcgcaaccagggaaaatgcgtggaagggggtgtcgagattttcgacatgctgctcgccacctcttcccggttccggatgatgaatctgcagggagaagagttcgtgtgtctgaagtcaatcatcctgctgaactccggggtctataccttcctgagctcgaccctcaagtcactggaggaaaaagaccacatccatcgcgtgctcgataagatcaccgacacccttatccatctcatggcgaaggctggactgaccctgcaacagcagcaccagaggctggcccagttgctgctgattctgagccacatccggcacatgtcgtccaagaggatggaacacctgtacagcatgaagtgcaagaacgtcgtgcctctgtccgatctgctcctggaaatgctggacgcgcacagactcgggacgggagctgaagatccacgacccagcagaaagcgacgggaagtgcaattggtggaatcagggggaggacttgtgcagcctggaggatcgctgagactgtcatgtgccgtgtccggctttgccctgtccaaccacgggatgtcctgggtccgccgcgcgcctggaaagggcctcgaatgggtgtcgggtattgtgtacagcggtagcacctactatgccgcatccgtgaaggggagattcaccatcagccgggacaactccaggaacactctgtacctccaaatgaattcgctgaggccagaggacactgccatctactactgctccgcgcatggcggagagtccgacgtctggggacaggggaccaccgtgaccgtgtctagcgcgtccggcggaggcggcagcgggggtcgggcatcagggggcggcggatcggacatccagctcacccagtccccgagctcgctgtccgcctccgtgggagatcgggtcaccatcacgtgccgcgccagccagtcgatttcctcctacctgaactggtaccaacagaagcccggaaaagccccgaagcttctcatctacgccgcctcgagcctgcagtcaggagtgccctcacggttctccggctccggttccggtactgatttcaccctgaccatttcctccctgcaaccggaggacttcgctacttactactgccagcagtcgtactccaccccctacactttcggacaaggcaccaaggtcgaaatcaagaccactaccccagcaccgaggccacccaccccggctcctaccatcgcctcccagcctctgtccctgcgtccggaggcatgtagacccgcagctggtggggccgtgcatacccggggtcttgacttcgcctgcgatatctacatttgggcccctctggctggtacttgcggggtcctgctgctttcactcgtgatcactctttactgtaagcgcggtcggaagaagctgctgtacatctttaagcaacccttcatgaggcctgtgcagactactcaagaggaggacggctgttcatgccggttcccagaggaggaggaaggcggctgcgaactgcgcgtgaaattcagccgcagcgcagatgctccagcctaccagcaggggcagaaccagctctacaacgaactcaatcttggtcggagagaggagtacgacgtgctggacaagcggagaggacgggacccagaaatgggcgggaagccgcgcagaaagaatccccaagagggcctgtacaacgagctccaaaaggataagatggcagaagcctatagcgagattggtatgaaaggggaacgcagaagaggcaaaggccacgacggactgtaccagggactcagcaccgccaccaaggacacctatgacgctcttcacatgcaggccctgccgcctcgg

SEQ ID NO: 1073 - DNA, 2229 bp, Artificial Sequence
  source: /note="Description of Artificial Sequence: Synthetic polynucleotide"
atggccctccctgtcaccgccctgctgcttccgctggctcttctgctccacgccgctcggcccgattcgttggcactttccctgactgccgaccagatggtgtccgcccttctggacgccgagcctccaattctgtactcggagtacgatccgactcgcccgttctccgaagccagcatgatgggcctgttgactaacctggcggaccgcgagttggtgcacatgattaactgggctaagcgggtgccgggcttcgtggacctgaccctgcacgaccaagtgcacctcctggaatgcgcctggatggaaatcctcatgatcggcctcgtgtggagatccatggagcatcccggaaagctcctgtttgcacccaacctcctgcttgatcgcaaccagggaaaatgcgtggaagggggtgtcgagattttcgacatgctgctcgccacctcttcccggttccggatgatgaatctgcagggagaagagttcgtgtgtctgaagtcaatcatcctgctgaactccggggtctataccttcctgagctcgaccctcaagtcactggaggaaaaagaccacatccatcgcgtgctcgataagatcaccgacacccttatccatctcatggcgaaggctggactgaccctgcaacagcagcaccagaggctggcccagttgctgctgattctgagccacatccggcacatgtcgaacaagaggatggaacacctgtacagcatgaagtgcaagaacgtcgtgcctctgtccgatctgctcctggaaatgctggacgcgcacagactcgggacgggagctgaagatccacgacccagcagaaagcgacgggaagtgcaattggtggaatcagggggaggacttgtgcagcctggaggatcgctgagactgtcatgtgccgtgtccggctttgccctgtccaaccacgggatgtcctgggtccgccgcgcgcctggaaagggcctcgaatgggtgtcgggtattgtgtacagcggtagcacctactatgccgcatccgtgaaggggagattcaccatcagccgggacaactccaggaacactctgtacctccaaatgaattcgctgaggccagaggacactgccatctactactgctccgcgcatggcggagagtccgacgtctggggacaggggaccaccgtgaccgtgtctagcgcgtccggcggaggcggcagcgggggtcgggcatcagggggcggcggatcggacatccagctcacccagtccccgagctcgctgtccgcctccgtgggagatcgggtcaccatcacgtgccgcgccagccagtcgatttcctcctacctgaactggtaccaacagaagcccggaaaagccccgaagcttctcatctacgccgcctcgagcctgcagtcaggagtgccctcacggttctccggctccggttccggtactgatttcaccctgaccatttcctccctgcaaccggaggacttcgctacttactactgccagcagtcgtactccaccccctacactttcggacaaggcaccaaggtcgaaatcaagaccactaccccagcaccgaggccacccaccccggctcctaccatcgcctcccagcctctgtccctgcgtccggaggcatgtagacccgcagctggtggggccgtgcatacccggggtcttgacttcgcctgcgatatctacatttgggcccctctggctggtacttgcggggtcctgctgctttcactcgtgatcactctttactgtaagcgcggtcggaagaagctgctgtacatctttaagcaacccttcatgaggcctgtgcagactactcaagaggaggacggctgttcatgccggttcccagaggaggaggaaggcggctgcgaactgcgcgtgaaattcagccgcagcgcagatgctccagcctaccagcaggggcagaaccagctctacaacgaactcaatcttggtcggagagaggagtacgacgtgctggacaagcggagaggacgggacccagaaatgggcgggaagccgcgcagaaagaatccccaagagggcctgtacaacgagctccaaaaggataagatggcagaagcctatagcgagattggtatgaaaggggaacgcagaagaggcaaaggccacgacggactgtaccagggactcagcaccgccaccaaggacacctatgacgctcttcacatgcaggccctgccgcctcgg

SEQ ID NO: 1074 - DNA, 2256 bp, Artificial Sequence
  source: /note="Description of Artificial Sequence: Synthetic polynucleotide"
atggccctccctgtcaccgccctgctgcttccgctggctcttctgctccacgccgctcggcccaactcgttggcactttccctgactgccgaccagatggtgtccgcccttctggacgccgagcctccaattctgtactcggagtacgatccgactcgcccgttctccgaagccagcatgatgggcctgttgactaacctggcggaccgcgagttggtgcacatgattaactgggctaagcgggtgccgggcttcgtggacctggccctgcacgaccaagtgcacctcctggaatgcgcctggatggaaatcctcatgatcggcctcgtgtggagatccatggagcatcccggaaagctcctgtttgcacccaacctcctgcttgatcgcaaccagggaaaatgcgtggaagggggtgtcgagattttcgacatgctgctcgccacctcttcccggttccggatgatgaatctgcagggagaagagttcgtgtgtctgaagtcaatcatcctgctgaactccggggtctataccttcctgagctcgaccctcaagtcactggaggaaaaagaccacatccatcgcgtgctcgataagatcaccgacacccttatccatctcatggcgaaggctggactgaccctgcaacagcagcaccagaggctggcccagttgctgctgattctgagccacatccggcacatgtcgtccaagaggatggaacacctgtacagcatgaagtgcaagaacgtcgtgcctctgtccgatctgctcctggaaatgctggacgcgcacagactcggaaccggcgcggaagacccccggccctccaggaagcgaaggtccctcggagacgtgggtgaaattgtgatgacccagtcacccgccactcttagcctttcacccggtgagcgcgcaaccctgtcttgcagagcctcccaagacatctcaaaataccttaattggtatcaacagaagcccggacaggctcctcgccttctgatctaccacaccagccggctccattctggaatccctgccaggttcagcggtagcggatctgggaccgactacaccctcactatcagctcactgcagccagaggacttcgctgtctatttctgtcagcaagggaacaccctgccctacacctttggacagggcaccaagctcgagattaaaggtggaggtggcagcggaggaggtgggtccggcggtggaggaagccaggtccaactccaagaaagcggaccgggtcttgtgaagccatcagaaactctttcactgacttgtactgtgagcggagtgtctctccccgattacggggtgtcttggatcagacagccaccggggaagggtctggaatggattggagtgatttggggctctgagactacttactactcttcatccctcaagtcacgcgtcaccatctcaaaggacaactctaagaatcaggtgtcactgaaactgtcatctgtgaccgcagccgacaccgccgtgtactattgcgctaagcattactattatggcgggagctacgcaatggattactggggacagggtactctggtcaccgtgtccagcaccactaccccagcaccgaggccacccaccccggctcctaccatcgcctcccagcctctgtccctgcgtccggaggcatgtagacccgcagctggtggggccgtgcatacccggggtcttgacttcgcctgcgatatctacatttgggcccctctggctggtacttgcggggtcctgctgctttcactcgtgatcactctttactgtaagcgcggtcggaagaagctgctgtacatctttaagcaacccttcatgaggcctgtgcagactactcaagaggaggacggctgttcatgccggttcccagaggaggaggaaggcggctgcgaactgcgcgtgaaattcagccgcagcgcagatgctccagcctaccagcaggggcagaaccagctctacaacgaactcaatcttggtcggagagaggagtacgacgtgctggacaagcggagaggacgggacccagaaatgggcgggaagccgcgcagaaagaatccccaagagggcctgtacaacgagctccaaaaggataagatggcagaagcctatagcgagattggtatgaaaggggaacgcagaagaggcaaaggccacgacggactgtaccagggactcagcaccgccaccaaggacacctatgacgctcttcacatgcaggccctgccgcctcgg

SEQ ID NO: 1075 - DNA, 2256 bp, Artificial Sequence
  source: /note="Description of Artificial Sequence: Synthetic polynucleotide"
atggccctccctgtcaccgccctgctgcttccgctggctcttctgctccacgccgctcggcccaactcgttggcactttccctgactgccgaccagatggtgtccgcccttctggacgccgagcctccaattctgtactcggagtacgatccgactcgcccgttctccgaagccagcatgatgggcctgttgactaacctggcggaccgcgagttggtgcacatgattaactgggctaagcgggtgccgggcttcgtggacctgaccctgcacgaccaagtgcacctcctggaatgcgcctggatggaaatcctcatgatcggcctcgtgtggagatccatggagcatcccggaaagctcctgtttgcacccaacctcctgcttgatcgcaaccagggaaaatgcgtggaagggggtgtcgagattttcgacatgctgctcgccacctcttcccggttccggatgatgaatctgcagggagaagagttcgtgtgtctgaagtcaatcatcctgctgaactccggggtctataccttcctgagctcgaccctcaagtcactggaggaaaaagaccacatccatcgcgtgctcgataagatcaccgacacccttatccatctcatggcgaaggctggactgaccctgcaacagcagcaccagaggctggcccagttgctgctgattctgagccacatccggcacatgtcgaacaagaggatggaacacctgtacagcatgaagtgcaagaacgtcgtgcctctgtccgatctgctcctggaaatgctggacgcgcacagactcggaaccggcgcggaagacccccggccctccaggaagcgaaggtccctcggagacgtgggtgaaattgtgatgacccagtcacccgccactcttagcctttcacccggtgagcgcgcaaccctgtcttgcagagcctcccaagacatctcaaaataccttaattggtatcaacagaagcccggacaggctcctcgccttctgatctaccacaccagccggctccattctggaatccctgccaggttcagcggtagcggatctgggaccgactacaccctcactatcagctcactgcagccagaggacttcgctgtctatttctgtcagcaagggaacaccctgccctacacctttggacagggcaccaagctcgagattaaaggtggaggtggcagcggaggaggtgggtccggcggtggaggaagccaggtccaactccaagaaagcggaccgggtcttgtgaagccatcagaaactctttcactgacttgtactgtgagcggagtgtctctccccgattacggggtgtcttggatcagacagccaccggggaagggtctggaatggattggagtgatttggggctctgagactacttactactcttcatccctcaagtcacgcgtcaccatctcaaaggacaactctaagaatcaggtgtcactgaaactgtcatctgtgaccgcagccgacaccgccgtgtactattgcgctaagcattactattatggcgggagctacgcaatggattactggggacagggtactctggtcaccgtgtccagcaccactaccccagcaccgaggccacccaccccggctcctaccatcgcctcccagcctctgtccctgcgtccggaggcatgtagacccgcagctggtggggccgtgcatacccggggtcttgacttcgcctgcgatatctacatttgggcccctctggctggtacttgcggggtcctgctgctttcactcgtgatcactctttactgtaagcgcggtcggaagaagctgctgtacatctttaagcaacccttcatgaggcctgtgcagactactcaagaggaggacggctgttcatgccggttcccagaggaggaggaaggcggctgcgaactgcgcgtgaaattcagccgcagcgcagatgctccagcctaccagcaggggcagaaccagctctacaacgaactcaatcttggtcggagagaggagtacgacgtgctggacaagcggagaggacgggacccagaaatgggcgggaagccgcgcagaaagaatccccaagagggcctgtacaacgagctccaaaaggataagatggcagaagcctatagcgagattggtatgaaaggggaacgcagaagaggcaaaggccacgacggactgtaccagggactcagcaccgccaccaaggacacctatgacgctcttcacatgcaggccctgccgcctcgg

SEQ ID NO: 1076 - DNA, 2238 bp, Artificial Sequence
  source: /note="Description of Artificial Sequence: Synthetic polynucleotide"
atggccctccctgtcaccgccctgctgcttccgctggctcttctgctccacgccgctcggcccaactcgttggcactttccctgactgccgaccagatggtgtccgcccttctggacgccgagcctccaattctgtactcggagtacgatccgactcgcccgttctccgaagccagcatgatgggcctgttgactaacctggcggaccgcgagttggtgcacatgattaactgggctaagcgggtgccgggcttcgtggacctggccctgcacgaccaagtgcacctcctggaatgcgcctggatggaaatcctcatgatcggcctcgtgtggagatccatggagcatcccggaaagctcctgtttgcacccaacctcctgcttgatcgcaaccagggaaaatgcgtggaagggggtgtcgagattttcgacatgctgctcgccacctcttcccggttccggatgatgaatctgcagggagaagagttcgtgtgtctgaagtcaatcatcctgctgaactccggggtctataccttcctgagctcgaccctcaagtcactggaggaaaaagaccacatccatcgcgtgctcgataagatcaccgacacccttatccatctcatggcgaaggctggactgaccctgcaacagcagcaccagaggctggcccagttgctgctgattctgagccacatccggcacatgtcgtccaagaggatggaacacctgtacagcatgaagtgcaagaacgtcgtgcctctgtccgatctgctcctggaaatgctggacgcgcacagactcgggacgggagctgaagatccacgacccagcagaaagcgacgggaaattgtgatgacccagtcacccgccactcttagcctttcacccggtgagcgcgcaaccctgtcttgcagagcctcccaagacatctcaaaataccttaattggtatcaacagaagcccggacaggctcctcgccttctgatctaccacaccagccggctccattctggaatccctgccaggttcagcggtagcggatctgggaccgactacaccctcactatcagctcactgcagccagaggacttcgctgtctatttctgtcagcaagggaacaccctgccctacacctttggacagggcaccaagctcgagattaaaggtggaggtggcagcggaggaggtgggtccggcggtggaggaagccaggtccaactccaagaaagcggaccgggtcttgtgaagccatcagaaactctttcactgacttgtactgtgagcggagtgtctctccccgattacggggtgtcttggatcagacagccaccggggaagggtctggaatggattggagtgatttggggctctgagactacttactactcttcatccctcaagtcacgcgtcaccatctcaaaggacaactctaagaatcaggtgtcactgaaactgtcatctgtgaccgcagccgacaccgccgtgtactattgcgctaagcattactattatggcgggagctacgcaatggattactggggacagggtactctggtcaccgtgtccagcaccactaccccagcaccgaggccacccaccccggctcctaccatcgcctcccagcctctgtccctgcgtccggaggcatgtagacccgcagctggtggggccgtgcatacccggggtcttgacttcgcctgcgatatctacatttgggcccctctggctggtacttgcggggtcctgctgctttcactcgtgatcactctttactgtaagcgcggtcggaagaagctgctgtacatctttaagcaacccttcatgaggcctgtgcagactactcaagaggaggacggctgttcatgccggttcccagaggaggaggaaggcggctgcgaactgcgcgtgaaattcagccgcagcgcagatgctccagcctaccagcaggggcagaaccagctctacaacgaactcaatcttggtcggagagaggagtacgacgtgctggacaagcggagaggacgggacccagaaatgggcgggaagccgcgcagaaagaatccccaagagggcctgtacaacgagctccaaaaggataagatggcagaagcctatagcgagattggtatgaaaggggaacgcagaagaggcaaaggccacgacggactgtaccagggactcagcaccgccaccaaggacacctatgacgctcttcacatgcaggccctgccgcctcgg

SEQ ID NO: 1077 - DNA, 2238 bp, Artificial Sequence
  source: /note="Description of Artificial Sequence: Synthetic polynucleotide"
atggccctccctgtcaccgccctgctgcttccgctggctcttctgctccacgccgctcggcccaactcgttggcactttccctgactgccgaccagatggtgtccgcccttctggacgccgagcctccaattctgtactcggagtacgatccgactcgcccgttctccgaagccagcatgatgggcctgttgactaacctggcggaccgcgagttggtgcacatgattaactgggctaagcgggtgccgggcttcgtggacctgaccctgcacgaccaagtgcacctcctggaatgcgcctggatggaaatcctcatgatcggcctcgtgtggagatccatggagcatcccggaaagctcctgtttgcacccaacctcctgcttgatcgcaaccagggaaaatgcgtggaagggggtgtcgagattttcgacatgctgctcgccacctcttcccggttccggatgatgaatctgcagggagaagagttcgtgtgtctgaagtcaatcatcctgctgaactccggggtctataccttcctgagctcgaccctcaagtcactggaggaaaaagaccacatccatcgcgtgctcgataagatcaccgacacccttatccatctcatggcgaaggctggactgaccctgcaacagcagcaccagaggctggcccagttgctgctgattctgagccacatccggcacatgtcgaacaagaggatggaacacctgtacagcatgaagtgcaagaacgtcgtgcctctgtccgatctgctcctggaaatgctggacgcgcacagactcgggacgggagctgaagatccacgacccagcagaaagcgacgggaaattgtgatgacccagtcacccgccactcttagcctttcacccggtgagcgcgcaaccctgtcttgcagagcctcccaagacatctcaaaataccttaattggtatcaacagaagcccggacaggctcctcgccttctgatctaccacaccagccggctccattctggaatccctgccaggttcagcggtagcggatctgggaccgactacaccctcactatcagctcactgcagccagaggacttcgctgtctatttctgtcagcaagggaacaccctgccctacacctttggacagggcaccaagctcgagattaaaggtggaggtggcagcggaggaggtgggtccggcggtggaggaagccaggtccaactccaagaaagcggaccgggtcttgtgaagccatcagaaactctttcactgacttgtactgtgagcggagtgtctctccccgattacggggtgtcttggatcagacagccaccggggaagggtctggaatggattggagtgatttggggctctgagactacttactactcttcatccctcaagtcacgcgtcaccatctcaaaggacaactctaagaatcaggtgtcactgaaactgtcatctgtgaccgcagccgacaccgccgtgtactattgcgctaagcattactattatggcgggagctacgcaatggattactggggacagggtactctggtcaccgtgtccagcaccactaccccagcaccgaggccacccaccccggctcctaccatcgcctcccagcctctgtccctgcgtccggaggcatgtagacccgcagctggtggggccgtgcatacccggggtcttgacttcgcctgcgatatctacatttgggcccctctggctggtacttgcggggtcctgctgctttcactcgtgatcactctttactgtaagcgcggtcggaagaagctgctgtacatctttaagcaacccttcatgaggcctgtgcagactactcaagaggaggacggctgttcatgccggttcccagaggaggaggaaggcggctgcgaactgcgcgtgaaattcagccgcagcgcagatgctccagcctaccagcaggggcagaaccagctctacaacgaactcaatcttggtcggagagaggagtacgacgtgctggacaagcggagaggacgggacccagaaatgggcgggaagccgcgcagaaagaatccccaagagggcctgtacaacgagctccaaaaggataagatggcagaagcctatagcgagattggtatgaaaggggaacgcagaagaggcaaaggccacgacggactgtaccagggactcagcaccgccaccaaggacacctatgacgctcttcacatgcaggccctgccgcctcgg

SEQ ID NO: 1078 - DNA, 2259 bp, Artificial Sequence
  source: /note="Description of Artificial Sequence: Synthetic polynucleotide"
atggccctccctgtcaccgccctgctgcttccgctggctcttctgctccacgccgctcggcccaactcgttggcactttccctgactgccgaccagatggtgtccgcccttctggacgccgagcctccaattctgtactcggagtacgatccgactcgcccgttctccgaagccagcatgatgggcctgttgactaacctggcggaccgcgagttggtgcacatgattaactgggctaagcgggtgccgggcttcgtggacctggccctgcacgaccaagtgcacctcctggaatgcgcctggatggaaatcctcatgatcggcctcgtgtggagatccatggagcatcccggaaagctcctgtttgcacccaacctcctgcttgatcgcaaccagggaaaatgcgtggaagggggtgtcgagattttcgacatgctgctcgccacctcttcccggttccggatgatgaatctgcagggagaagagttcgtgtgtctgaagtcaatcatcctgctgaactccggggtctataccttcctgagctcgaccctcaagtcactggaggaaaaagaccacatccatcgcgtgctcgataagatcaccgacacccttatccatctcatggcgaaggctggactgaccctgcaacagcagcaccagaggctggcccagttgctgctgattctgagccacatccggcacatgtcgtccaagaggatggaacacctgtacagcatgaagtgcaagaacgtcgtgcctctgtccgatctgctcctggaaatgctggacgcgcacagactcggaaccggcgcggaagacccccggccctccaggaagcgaaggtccctcggagacgtgggtcaagtgcaactcgtccaaagcggagcggaagtcaagaaacccggagcgagcgtgaaagtgtcctgcaaagcctccggctacacctttacgggctactacatgcactgggtgcgccaggcaccaggacagggtcttgaatggatgggatggatcaaccctaattcgggcggaactaactacgcacagaagttccaggggagagtgactctgactcgggatacctccatctcaactgtctacatggaactctcccgcttgcggtcagatgatacggcagtgtactactgcgcccgcgacatgaatatcctggctaccgtgccgttcgacatctggggacaggggactatggttactgtctcatcgggcggtggaggttcaggaggaggcggctcgggaggcggaggttcggacattcagatgacccagtccccatcctctctgtcggccagcgtcggagatagggtgaccattacctgtcgggcctcgcaaagcatctcctcgtacctcaactggtatcagcaaaagccgggaaaggcgcctaagctgctgatctacgccgcttcgagcttgcaaagcggggtgccatccagattctcgggatcaggctcaggaaccgacttcaccctgaccgtgaacagcctccagccggaggactttgccacttactactgccagcagggagactccgtgccgcttactttcggggggggtacccgcctggagatcaagaccactaccccagcaccgaggccacccaccccggctcctaccatcgcctcccagcctctgtccctgcgtccggaggcatgtagacccgcagctggtggggccgtgcatacccggggtcttgacttcgcctgcgatatctacatttgggcccctctggctggtacttgcggggtcctgctgctttcactcgtgatcactctttactgtaagcgcggtcggaagaagctgctgtacatctttaagcaacccttcatgaggcctgtgcagactactcaagaggaggacggctgttcatgccggttcccagaggaggaggaaggcggctgcgaactgcgcgtgaaattcagccgcagcgcagatgctccagcctaccagcaggggcagaaccagctctacaacgaactcaatcttggtcggagagaggagtacgacgtgctggacaagcggagaggacgggacccagaaatgggcgggaagccgcgcagaaagaatccccaagagggcctgtacaacgagctccaaaaggataagatggcagaagcctatagcgagattggtatgaaaggggaacgcagaagaggcaaaggccacgacggactgtaccagggactcagcaccgccaccaaggacacctatgacgctcttcacatgcaggccctgccgcctcgg

SEQ ID NO: 1079 - DNA, 2259 bp, Artificial Sequence
  source: /note="Description of Artificial Sequence: Synthetic polynucleotide"
atggccctccctgtcaccgccctgctgcttccgctggctcttctgctccacgccgctcggcccaactcgttggcactttccctgactgccgaccagatggtgtccgcccttctggacgccgagcctccaattctgtactcggagtacgatccgactcgcccgttctccgaagccagcatgatgggcctgttgactaacctggcggaccgcgagttggtgcacatgattaactgggctaagcgggtgccgggcttcgtggacctgaccctgcacgaccaagtgcacctcctggaatgcgcctggatggaaatcctcatgatcggcctcgtgtggagatccatggagcatcccggaaagctcctgtttgcacccaacctcctgcttgatcgcaaccagggaaaatgcgtggaagggggtgtcgagattttcgacatgctgctcgccacctcttcccggttccggatgatgaatctgcagggagaagagttcgtgtgtctgaagtcaatcatcctgctgaactccggggtctataccttcctgagctcgaccctcaagtcactggaggaaaaagaccacatccatcgcgtgctcgataagatcaccgacacccttatccatctcatggcgaaggctggactgaccctgcaacagcagcaccagaggctggcccagttgctgctgattctgagccacatccggcacatgtcgaacaagaggatggaacacctgtacagcatgaagtgcaagaacgtcgtgcctctgtccgatctgctcctggaaatgctggacgcgcacagactcggaaccggcgcggaagacccccggccctccaggaagcgaaggtccctcggagacgtgggtcaagtgcaactcgtccaaagcggagcggaagtcaagaaacccggagcgagcgtgaaagtgtcctgcaaagcctccggctacacctttacgggctactacatgcactgggtgcgccaggcaccaggacagggtcttgaatggatgggatggatcaaccctaattcgggcggaactaactacgcacagaagttccaggggagagtgactctgactcgggatacctccatctcaactgtctacatggaactctcccgcttgcggtcagatgatacggcagtgtactactgcgcccgcgacatgaatatcctggctaccgtgccgttcgacatctggggacaggggactatggttactgtctcatcgggcggtggaggttcaggaggaggcggctcgggaggcggaggttcggacattcagatgacccagtccccatcctctctgtcggccagcgtcggagatagggtgaccattacctgtcgggcctcgcaaagcatctcctcgtacctcaactggtatcagcaaaagccgggaaaggcgcctaagctgctgatctacgccgcttcgagcttgcaaagcggggtgccatccagattctcgggatcaggctcaggaaccgacttcaccctgaccgtgaacagcctccagccggaggactttgccacttactactgccagcagggagactccgtgccgcttactttcggggggggtacccgcctggagatcaagaccactaccccagcaccgaggccacccaccccggctcctaccatcgcctcccagcctctgtccctgcgtccggaggcatgtagacccgcagctggtggggccgtgcatacccggggtcttgacttcgcctgcgatatctacatttgggcccctctggctggtacttgcggggtcctgctgctttcactcgtgatcactctttactgtaagcgcggtcggaagaagctgctgtacatctttaagcaacccttcatgaggcctgtgcagactactcaagaggaggacggctgttcatgccggttcccagaggaggaggaaggcggctgcgaactgcgcgtgaaattcagccgcagcgcagatgctccagcctaccagcaggggcagaaccagctctacaacgaactcaatcttggtcggagagaggagtacgacgtgctggacaagcggagaggacgggacccagaaatgggcgggaagccgcgcagaaagaatccccaagagggcctgtacaacgagctccaaaaggataagatggcagaagcctatagcgagattggtatgaaaggggaacgcagaagaggcaaaggccacgacggactgtaccagggactcagcaccgccaccaaggacacctatgacgctcttcacatgcaggccctgccgcctcgg

SEQ ID NO: 1080 - DNA, 2241 bp, Artificial Sequence
  source: /note="Description of Artificial Sequence: Synthetic polynucleotide"
atggccctccctgtcaccgccctgctgcttccgctggctcttctgctccacgccgctcggcccaactcgttggcactttccctgactgccgaccagatggtgtccgcccttctggacgccgagcctccaattctgtactcggagtacgatccgactcgcccgttctccgaagccagcatgatgggcctgttgactaacctggcggaccgcgagttggtgcacatgattaactgggctaagcgggtgccgggcttcgtggacctggccctgcacgaccaagtgcacctcctggaatgcgcctggatggaaatcctcatgatcggcctcgtgtggagatccatggagcatcccggaaagctcctgtttgcacccaacctcctgcttgatcgcaaccagggaaaatgcgtggaagggggtgtcgagattttcgacatgctgctcgccacctcttcccggttccggatgatgaatctgcagggagaagagttcgtgtgtctgaagtcaatcatcctgctgaactccggggtctataccttcctgagctcgaccctcaagtcactggaggaaaaagaccacatccatcgcgtgctcgataagatcaccgacacccttatccatctcatggcgaaggctggactgaccctgcaacagcagcaccagaggctggcccagttgctgctgattctgagccacatccggcacatgtcgtccaagaggatggaacacctgtacagcatgaagtgcaagaacgtcgtgcctctgtccgatctgctcctggaaatgctggacgcgcacagactcggaaccggcgcggaagacccccggccctccaggaagcgaaggcaagtgcaactcgtccaaagcggagcggaagtcaagaaacccggagcgagcgtgaaagtgtcctgcaaagcctccggctacacctttacgggctactacatgcactgggtgcgccaggcaccaggacagggtcttgaatggatgggatggatcaaccctaattcgggcggaactaactacgcacagaagttccaggggagagtgactctgactcgggatacctccatctcaactgtctacatggaactctcccgcttgcggtcagatgatacggcagtgtactactgcgcccgcgacatgaatatcctggctaccgtgccgttcgacatctggggacaggggactatggttactgtctcatcgggcggtggaggttcaggaggaggcggctcgggaggcggaggttcggacattcagatgacccagtccccatcctctctgtcggccagcgtcggagatagggtgaccattacctgtcgggcctcgcaaagcatctcctcgtacctcaactggtatcagcaaaagccgggaaaggcgcctaagctgctgatctacgccgcttcgagcttgcaaagcggggtgccatccagattctcgggatcaggctcaggaaccgacttcaccctgaccgtgaacagcctccagccggaggactttgccacttactactgccagcagggagactccgtgccgcttactttcggggggggtacccgcctggagatcaagaccactaccccagcaccgaggccacccaccccggctcctaccatcgcctcccagcctctgtccctgcgtccggaggcatgtagacccgcagctggtggggccgtgcatacccggggtcttgacttcgcctgcgatatctacatttgggcccctctggctggtacttgcggggtcctgctgctttcactcgtgatcactctttactgtaagcgcggtcggaagaagctgctgtacatctttaagcaacccttcatgaggcctgtgcagactactcaagaggaggacggctgttcatgccggttcccagaggaggaggaaggcggctgcgaactgcgcgtgaaattcagccgcagcgcagatgctccagcctaccagcaggggcagaaccagctctacaacgaactcaatcttggtcggagagaggagtacgacgtgctggacaagcggagaggacgggacccagaaatgggcgggaagccgcgcagaaagaatccccaagagggcctgtacaacgagctccaaaaggataagatggcagaagcctatagcgagattggtatgaaaggggaacgcagaagaggcaaaggccacgacggactgtaccagggactcagcaccgccaccaaggacacctatgacgctcttcacatgcaggccctgccgcctcgg

SEQ ID NO: 1081 - DNA, 2241 bp, Artificial Sequence
  source: /note="Description of Artificial Sequence: Synthetic polynucleotide"
atggccctccctgtcaccgccctgctgcttccgctggctcttctgctccacgccgctcggcccaactcgttggcactttccctgactgccgaccagatggtgtccgcccttctggacgccgagcctccaattctgtactcggagtacgatccgactcgcccgttctccgaagccagcatgatgggcctgttgactaacctggcggaccgcgagttggtgcacatgattaactgggctaagcgggtgccgggcttcgtggacctgaccctgcacgaccaagtgcacctcctggaatgcgcctggatggaaatcctcatgatcggcctcgtgtggagatccatggagcatcccggaaagctcctgtttgcacccaacctcctgcttgatcgcaaccagggaaaatgcgtggaagggggtgtcgagattttcgacatgctgctcgccacctcttcccggttccggatgatgaatctgcagggagaagagttcgtgtgtctgaagtcaatcatcctgctgaactccggggtctataccttcctgagctcgaccctcaagtcactggaggaaaaagaccacatccatcgcgtgctcgataagatcaccgacacccttatccatctcatggcgaaggctggactgaccctgcaacagcagcaccagaggctggcccagttgctgctgattctgagccacatccggcacatgtcgaacaagaggatggaacacctgtacagcatgaagtgcaagaacgtcgtgcctctgtccgatctgctcctggaaatgctggacgcgcacagactcgggacgggagctgaagatccacgacccagcagaaagcgacggcaagtgcaactcgtccaaagcggagcggaagtcaagaaacccggagcgagcgtgaaagtgtcctgcaaagcctccggctacacctttacgggctactacatgcactgggtgcgccaggcaccaggacagggtcttgaatggatgggatggatcaaccctaattcgggcggaactaactacgcacagaagttccaggggagagtgactctgactcgggatacctccatctcaactgtctacatggaactctcccgcttgcggtcagatgatacggcagtgtactactgcgcccgcgacatgaatatcctggctaccgtgccgttcgacatctggggacaggggactatggttactgtctcatcgggcggtggaggttcaggaggaggcggctcgggaggcggaggttcggacattcagatgacccagtccccatcctctctgtcggccagcgtcggagatagggtgaccattacctgtcgggcctcgcaaagcatctcctcgtacctcaactggtatcagcaaaagccgggaaaggcgcctaagctgctgatctacgccgcttcgagcttgcaaagcggggtgccatccagattctcgggatcaggctcaggaaccgacttcaccctgaccgtgaacagcctccagccggaggactttgccacttactactgccagcagggagactccgtgccgcttactttcggggggggtacccgcctggagatcaagaccactaccccagcaccgaggccacccaccccggctcctaccatcgcctcccagcctctgtccctgcgtccggaggcatgtagacccgcagctggtggggccgtgcatacccggggtcttgacttcgcctgcgatatctacatttgggcccctctggctggtacttgcggggtcctgctgctttcactcgtgatcactctttactgtaagcgcggtcggaagaagctgctgtacatctttaagcaacccttcatgaggcctgtgcagactactcaagaggaggacggctgttcatgccggttcccagaggaggaggaaggcggctgcgaactgcgcgtgaaattcagccgcagcgcagatgctccagcctaccagcaggggcagaaccagctctacaacgaactcaatcttggtcggagagaggagtacgacgtgctggacaagcggagaggacgggacccagaaatgggcgggaagccgcgcagaaagaatccccaagagggcctgtacaacgagctccaaaaggataagatggcagaagcctatagcgagattggtatgaaaggggaacgcagaagaggcaaaggccacgacggactgtaccagggactcagcaccgccaccaaggacacctatgacgctcttcacatgcaggccctgccgcctcgg

SEQ ID NO: 1082 - DNA, 2247 bp, Artificial Sequence
  source: /note="Description of Artificial Sequence: Synthetic polynucleotide"
atggccctccctgtcaccgccctgctgcttccgctggctcttctgctccacgccgctcggcccaactcgttggcactttccctgactgccgaccagatggtgtccgcccttctggacgccgagcctccaattctgtactcggagtacgatccgactcgcccgttctccgaagccagcatgatgggcctgttgactaacctggcggaccgcgagttggtgcacatgattaactgggctaagcgggtgccgggcttcgtggacctggccctgcacgaccaagtgcacctcctggaatgcgcctggatggaaatcctcatgatcggcctcgtgtggagatccatggagcatcccggaaagctcctgtttgcacccaacctcctgcttgatcgcaaccagggaaaatgcgtggaagggggtgtcgagattttcgacatgctgctcgccacctcttcccggttccggatgatgaatctgcagggagaagagttcgtgtgtctgaagtcaatcatcctgctgaactccggggtctataccttcctgagctcgaccctcaagtcactggaggaaaaagaccacatccatcgcgtgctcgataagatcaccgacacccttatccatctcatggcgaaggctggactgaccctgcaacagcagcaccagaggctggcccagttgctgctgattctgagccacatccggcacatgtcgtccaagaggatggaacacctgtacagcatgaagtgcaagaacgtcgtgcctctgtccgatctgctcctggaaatgctggacgcgcacagactcggaaccggcgcggaagacccccggccctccaggaagcgaaggtccctcggagacgtgggtgaagtgcaattggtggaatcagggggaggacttgtgcagcctggaggatcgctgagactgtcatgtgccgtgtccggctttgccctgtccaaccacgggatgtcctgggtccgccgcgcgcctggaaagggcctcgaatgggtgtcgggtattgtgtacagcggtagcacctactatgccgcatccgtgaaggggagattcaccatcagccgggacaactccaggaacactctgtacctccaaatgaattcgctgaggccagaggacactgccatctactactgctccgcgcatggcggagagtccgacgtctggggacaggggaccaccgtgaccgtgtctagcgcgtccggcggaggcggcagcgggggtcgggcatcagggggcggcggatcggacatccagctcacccagtccccgagctcgctgtccgcctccgtgggagatcgggtcaccatcacgtgccgcgccagccagtcgatttcctcctacctgaactggtaccaacagaagcccggaaaagccccgaagcttctcatctacgccgcctcgagcctgcagtcaggagtgccctcacggttctccggctccggttccggtactgatttcaccctgaccatttcctccctgcaaccggaggacttcgctacttactactgccagcagtcgtactccaccccctacactttcggacaaggcaccaaggtcgaaatcaagaccactaccccagcaccgaggccacccaccccggctcctaccatcgcctcccagcctctgtccctgcgtccggaggcatgtagacccgcagctggtggggccgtgcatacccggggtcttgacttcgcctgcgatatctacatttgggcccctctggctggtacttgcggggtcctgctgctttcactcgtgatcactctttactgtaagcgcggtcggaagaagctgctgtacatctttaagcaacccttcatgaggcctgtgcagactactcaagaggaggacggctgttcatgccggttcccagaggaggaggaaggcggctgcgaactgcgcgtgaaattcagccgcagcgcagatgctccagcctaccagcaggggcagaaccagctctacaacgaactcaatcttggtcggagagaggagtacgacgtgctggacaagcggagaggacgggacccagaaatgggcgggaagccgcgcagaaagaatccccaagagggcctgtacaacgagctccaaaaggataagatggcagaagcctatagcgagattggtatgaaaggggaacgcagaagaggcaaaggccacgacggactgtaccagggactcagcaccgccaccaaggacacctatgacgctcttcacatgcaggccctgccgcctcgg

SEQ ID NO: 1083 - DNA, 2247 bp, Artificial Sequence
  source: /note="Description of Artificial Sequence: Synthetic polynucleotide"
atggccctccctgtcaccgccctgctgcttccgctggctcttctgctccacgccgctcggcccaactcgttggcactttccctgactgccgaccagatggtgtccgcccttctggacgccgagcctccaattctgtactcggagtacgatccgactcgcccgttctccgaagccagcatgatgggcctgttgactaacctggcggaccgcgagttggtgcacatgattaactgggctaagcgggtgccgggcttcgtggacctgaccctgcacgaccaagtgcacctcctggaatgcgcctggatggaaatcctcatgatcggcctcgtgtggagatccatggagcatcccggaaagctcctgtttgcacccaacctcctgcttgatcgcaaccagggaaaatgcgtggaagggggtgtcgagattttcgacatgctgctcgccacctcttcccggttccggatgatgaatctgcagggagaagagttcgtgtgtctgaagtcaatcatcctgctgaactccggggtctataccttcctgagctcgaccctcaagtcactggaggaaaaagaccacatccatcgcgtgctcgataagatcaccgacacccttatccatctcatggcgaaggctggactgaccctgcaacagcagcaccagaggctggcccagttgctgctgattctgagccacatccggcacatgtcgaacaagaggatggaacacctgtacagcatgaagtgcaagaacgtcgtgcctctgtccgatctgctcctggaaatgctggacgcgcacagactcggaaccggcgcggaagacccccggccctccaggaagcgaaggtccctcggagacgtgggtgaagtgcaattggtggaatcagggggaggacttgtgcagcctggaggatcgctgagactgtcatgtgccgtgtccggctttgccctgtccaaccacgggatgtcctgggtccgccgcgcgcctggaaagggcctcgaatgggtgtcgggtattgtgtacagcggtagcacctactatgccgcatccgtgaaggggagattcaccatcagccgggacaactccaggaacactctgtacctccaaatgaattcgctgaggccagaggacactgccatctactactgctccgcgcatggcggagagtccgacgtctggggacaggggaccaccgtgaccgtgtctagcgcgtccggcggaggcggcagcgggggtcgggcatcagggggcggcggatcggacatccagctcacccagtccccgagctcgctgtccgcctccgtgggagatcgggtcaccatcacgtgccgcgccagccagtcgatttcctcctacctgaactggtaccaacagaagcccggaaaagccccgaagcttctcatctacgccgcctcgagcctgcagtcaggagtgccctcacggttctccggctccggttccggtactgatttcaccctgaccatttcctccctgcaaccggaggacttcgctacttactactgccagcagtcgtactccaccccctacactttcggacaaggcaccaaggtcgaaatcaagaccactaccccagcaccgaggccacccaccccggctcctaccatcgcctcccagcctctgtccctgcgtccggaggcatgtagacccgcagctggtggggccgtgcatacccggggtcttgacttcgcctgcgatatctacatttgggcccctctggctggtacttgcggggtcctgctgctttcactcgtgatcactctttactgtaagcgcggtcggaagaagctgctgtacatctttaagcaacccttcatgaggcctgtgcagactactcaagaggaggacggctgttcatgccggttcccagaggaggaggaaggcggctgcgaactgcgcgtgaaattcagccgcagcgcagatgctccagcctaccagcaggggcagaaccagctctacaacgaactcaatcttggtcggagagaggagtacgacgtgctggacaagcggagaggacgggacccagaaatgggcgggaagccgcgcagaaagaatccccaagagggcctgtacaacgagctccaaaaggataagatggcagaagcctatagcgagattggtatgaaaggggaacgcagaagaggcaaaggccacgacggactgtaccagggactcagcaccgccaccaaggacacctatgacgctcttcacatgcaggccctgccgcctcgg

SEQ ID NO: 1084 - DNA, 2229 bp, Artificial Sequence
  source: /note="Description of Artificial Sequence: Synthetic polynucleotide"
atggccctccctgtcaccgccctgctgcttccgctggctcttctgctccacgccgctcggcccaactcgttggcactttccctgactgccgaccagatggtgtccgcccttctggacgccgagcctccaattctgtactcggagtacgatccgactcgcccgttctccgaagccagcatgatgggcctgttgactaacctggcggaccgcgagttggtgcacatgattaactgggctaagcgggtgccgggcttcgtggacctggccctgcacgaccaagtgcacctcctggaatgcgcctggatggaaatcctcatgatcggcctcgtgtggagatccatggagcatcccggaaagctcctgtttgcacccaacctcctgcttgatcgcaaccagggaaaatgcgtggaagggggtgtcgagattttcgacatgctgctcgccacctcttcccggttccggatgatgaatctgcagggagaagagttcgtgtgtctgaagtcaatcatcctgctgaactccggggtctataccttcctgagctcgaccctcaagtcactggaggaaaaagaccacatccatcgcgtgctcgataagatcaccgacacccttatccatctcatggcgaaggctggactgaccctgcaacagcagcaccagaggctggcccagttgctgctgattctgagccacatccggcacatgtcgtccaagaggatggaacacctgtacagcatgaagtgcaagaacgtcgtgcctctgtccgatctgctcctggaaatgctggacgcgcacagactcgggacgggagctgaagatccacgacccagcagaaagcgacgggaagtgcaattggtggaatcagggggaggacttgtgcagcctggaggatcgctgagactgtcatgtgccgtgtccggctttgccctgtccaaccacgggatgtcctgggtccgccgcgcgcctggaaagggcctcgaatgggtgtcgggtattgtgtacagcggtagcacctactatgccgcatccgtgaaggggagattcaccatcagccgggacaactccaggaacactctgtacctccaaatgaattcgctgaggccagaggacactgccatctactactgctccgcgcatggcggagagtccgacgtctggggacaggggaccaccgtgaccgtgtctagcgcgtccggcggaggcggcagcgggggtcgggcatcagggggcggcggatcggacatccagctcacccagtccccgagctcgctgtccgcctccgtgggagatcgggtcaccatcacgtgccgcgccagccagtcgatttcctcctacctgaactggtaccaacagaagcccggaaaagccccgaagcttctcatctacgccgcctcgagcctgcagtcaggagtgccctcacggttctccggctccggttccggtactgatttcaccctgaccatttcctccctgcaaccggaggacttcgctacttactactgccagcagtcgtactccaccccctacactttcggacaaggcaccaaggtcgaaatcaagaccactaccccagcaccgaggccacccaccccggctcctaccatcgcctcccagcctctgtccctgcgtccggaggcatgtagacccgcagctggtggggccgtgcatacccggggtcttgacttcgcctgcgatatctacatttgggcccctctggctggtacttgcggggtcctgctgctttcactcgtgatcactctttactgtaagcgcggtcggaagaagctgctgtacatctttaagcaacccttcatgaggcctgtgcagactactcaagaggaggacggctgttcatgccggttcccagaggaggaggaaggcggctgcgaactgcgcgtgaaattcagccgcagcgcagatgctccagcctaccagcaggggcagaaccagctctacaacgaactcaatcttggtcggagagaggagtacgacgtgctggacaagcggagaggacgggacccagaaatgggcgggaagccgcgcagaaagaatccccaagagggcctgtacaacgagctccaaaaggataagatggcagaagcctatagcgagattggtatgaaaggggaacgcagaagaggcaaaggccacgacggactgtaccagggactcagcaccgccaccaaggacacctatgacgctcttcacatgcaggccctgccgcctcgg

SEQ ID NO: 1085 - DNA, 2229 bp, Artificial Sequence
  source: /note="Description of Artificial Sequence: Synthetic polynucleotide"
atggccctccctgtcaccgccctgctgcttccgctggctcttctgctccacgccgctcggcccaactcgttggcactttccctgactgccgaccagatggtgtccgcccttctggacgccgagcctccaattctgtactcggagtacgatccgactcgcccgttctccgaagccagcatgatgggcctgttgactaacctggcggaccgcgagttggtgcacatgattaactgggctaagcgggtgccgggcttcgtggacctgaccctgcacgaccaagtgcacctcctggaatgcgcctggatggaaatcctcatgatcggcctcgtgtggagatccatggagcatcccggaaagctcctgtttgcacccaacctcctgcttgatcgcaaccagggaaaatgcgtggaagggggtgtcgagattttcgacatgctgctcgccacctcttcccggttccggatgatgaatctgcagggagaagagttcgtgtgtctgaagtcaatcatcctgctgaactccggggtctataccttcctgagctcgaccctcaagtcactggaggaaaaagaccacatccatcgcgtgctcgataagatcaccgacacccttatccatctcatggcgaaggctggactgaccctgcaacagcagcaccagaggctggcccagttgctgctgattctgagccacatccggcacatgtcgaacaagaggatggaacacctgtacagcatgaagtgcaagaacgtcgtgcctctgtccgatctgctcctggaaatgctggacgcgcacagactcgggacgggagctgaagatccacgacccagcagaaagcgacgggaagtgcaattggtggaatcagggggaggacttgtgcagcctggaggatcgctgagactgtcatgtgccgtgtccggctttgccctgtccaaccacgggatgtcctgggtccgccgcgcgcctggaaagggcctcgaatgggtgtcgggtattgtgtacagcggtagcacctactatgccgcatccgtgaaggggagattcaccatcagccgggacaactccaggaacactctgtacctccaaatgaattcgctgaggccagaggacactgccatctactactgctccgcgcatggcggagagtccgacgtctggggacaggggaccaccgtgaccgtgtctagcgcgtccggcggaggcggcagcgggggtcgggcatcagggggcggcggatcggacatccagctcacccagtccccgagctcgctgtccgcctccgtgggagatcgggtcaccatcacgtgccgcgccagccagtcgatttcctcctacctgaactggtaccaacagaagcccggaaaagccccgaagcttctcatctacgccgcctcgagcctgcagtcaggagtgccctcacggttctccggctccggttccggtactgatttcaccctgaccatttcctccctgcaaccggaggacttcgctacttactactgccagcagtcgtactccaccccctacactttcggacaaggcaccaaggtcgaaatcaagaccactaccccagcaccgaggccacccaccccggctcctaccatcgcctcccagcctctgtccctgcgtccggaggcatgtagacccgcagctggtggggccgtgcatacccggggtcttgacttcgcctgcgatatctacatttgggcccctctggctggtacttgcggggtcctgctgctttcactcgtgatcactctttactgtaagcgcggtcggaagaagctgctgtacatctttaagcaacccttcatgaggcctgtgcagactactcaagaggaggacggctgttcatgccggttcccagaggaggaggaaggcggctgcgaactgcgcgtgaaattcagccgcagcgcagatgctccagcctaccagcaggggcagaaccagctctacaacgaactcaatcttggtcggagagaggagtacgacgtgctggacaagcggagaggacgggacccagaaatgggcgggaagccgcgcagaaagaatccccaagagggcctgtacaacgagctccaaaaggataagatggcagaagcctatagcgagattggtatgaaaggggaacgcagaagaggcaaaggccacgacggactgtaccagggactcagcaccgccaccaaggacacctatgacgctcttcacatgcaggccctgccgcctcgg

SEQ ID NO: 1086 - DNA, 2256 bp, Artificial Sequence
  source: /note="Description of Artificial Sequence: Synthetic polynucleotide"
atggccctccctgtcaccgccctgctgcttccgctggctcttctgctccacgccgctcggcccgagtcgttggcactttccctgactgccgaccagatggtgtccgcccttctggacgccgagcctccaattctgtactcggagtacgatccgactcgcccgttctccgaagccagcatgatgggcctgttgactaacctggcggaccgcgagttggtgcacatgattaactgggctaagcgggtgccgggcttcgtggacctggccctgcacgaccaagtgcacctcctggaatgcgcctggatggaaatcctcatgatcggcctcgtgtggagatccatggagcatcccggaaagctcctgtttgcacccaacctcctgcttgatcgcaaccagggaaaatgcgtggaagggggtgtcgagattttcgacatgctgctcgccacctcttcccggttccggatgatgaatctgcagggagaagagttcgtgtgtctgaagtcaatcatcctgctgaactccggggtctataccttcctgagctcgaccctcaagtcactggaggaaaaagaccacatccatcgcgtgctcgataagatcaccgacacccttatccatctcatggcgaaggctggactgaccctgcaacagcagcaccagaggctggcccagttgctgctgattctgagccacatccggcacatgtcgtccaagaggatggaacacctgtacagcatgaagtgcaagaacgtcgtgcctctgtccgatctgctcctggaaatgctggacgcgcacagactcggaaccggcgcggaagacccccggccctccaggaagcgaaggtccctcggagacgtgggtgaaattgtgatgacccagtcacccgccactcttagcctttcacccggtgagcgcgcaaccctgtcttgcagagcctcccaagacatctcaaaataccttaattggtatcaacagaagcccggacaggctcctcgccttctgatctaccacaccagccggctccattctggaatccctgccaggttcagcggtagcggatctgggaccgactacaccctcactatcagctcactgcagccagaggacttcgctgtctatttctgtcagcaagggaacaccctgccctacacctttggacagggcaccaagctcgagattaaaggtggaggtggcagcggaggaggtgggtccggcggtggaggaagccaggtccaactccaagaaagcggaccgggtcttgtgaagccatcagaaactctttcactgacttgtactgtgagcggagtgtctctccccgattacggggtgtcttggatcagacagccaccggggaagggtctggaatggattggagtgatttggggctctgagactacttactactcttcatccctcaagtcacgcgtcaccatctcaaaggacaactctaagaatcaggtgtcactgaaactgtcatctgtgaccgcagccgacaccgccgtgtactattgcgctaagcattactattatggcgggagctacgcaatggattactggggacagggtactctggtcaccgtgtccagcaccactaccccagcaccgaggccacccaccccggctcctaccatcgcctcccagcctctgtccctgcgtccggaggcatgtagacccgcagctggtggggccgtgcatacccggggtcttgacttcgcctgcgatatctacatttgggcccctctggctggtacttgcggggtcctgctgctttcactcgtgatcactctttactgtaagcgcggtcggaagaagctgctgtacatctttaagcaacccttcatgaggcctgtgcagactactcaagaggaggacggctgttcatgccggttcccagaggaggaggaaggcggctgcgaactgcgcgtgaaattcagccgcagcgcagatgctccagcctaccagcaggggcagaaccagctctacaacgaactcaatcttggtcggagagaggagtacgacgtgctggacaagcggagaggacgggacccagaaatgggcgggaagccgcgcagaaagaatccccaagagggcctgtacaacgagctccaaaaggataagatggcagaagcctatagcgagattggtatgaaaggggaacgcagaagaggcaaaggccacgacggactgtaccagggactcagcaccgccaccaaggacacctatgacgctcttcacatgcaggccctgccgcctcgg

SEQ ID NO: 1087 - DNA, 2256 bp, Artificial Sequence
  source: /note="Description of Artificial Sequence: Synthetic polynucleotide"
atggccctccctgtcaccgccctgctgcttccgctggctcttctgctccacgccgctcggcccgagtcgttggcactttccctgactgccgaccagatggtgtccgcccttctggacgccgagcctccaattctgtactcggagtacgatccgactcgcccgttctccgaagccagcatgatgggcctgttgactaacctggcggaccgcgagttggtgcacatgattaactgggctaagcgggtgccgggcttcgtggacctgaccctgcacgaccaagtgcacctcctggaatgcgcctggatggaaatcctcatgatcggcctcgtgtggagatccatggagcatcccggaaagctcctgtttgcacccaacctcctgcttgatcgcaaccagggaaaatgcgtggaagggggtgtcgagattttcgacatgctgctcgccacctcttcccggttccggatgatgaatctgcagggagaagagttcgtgtgtctgaagtcaatcatcctgctgaactccggggtctataccttcctgagctcgaccctcaagtcactggaggaaaaagaccacatccatcgcgtgctcgataagatcaccgacacccttatccatctcatggcgaaggctggactgaccctgcaacagcagcaccagaggctggcccagttgctgctgattctgagccacatccggcacatgtcgaacaagaggatggaacacctgtacagcatgaagtgcaagaacgtcgtgcctctgtccgatctgctcctggaaatgctggacgcgcacagactcggaaccggcgcggaagacccccggccctccaggaagcgaaggtccctcggagacgtgggtgaaattgtgatgacccagtcacccgccactcttagcctttcacccggtgagcgcgcaaccctgtcttgcagagcctcccaagacatctcaaaataccttaattggtatcaacagaagcccggacaggctcctcgccttctgatctaccacaccagccggctccattctggaatccctgccaggttcagcggtagcggatctgggaccgactacaccctcactatcagctcactgcagccagaggacttcgctgtctatttctgtcagcaagggaacaccctgccctacacctttggacagggcaccaagctcgagattaaaggtggaggtggcagcggaggaggtgggtccggcggtggaggaagccaggtccaactccaagaaagcggaccgggtcttgtgaagccatcagaaactctttcactgacttgtactgtgagcggagtgtctctccccgattacggggtgtcttggatcagacagccaccggggaagggtctggaatggattggagtgatttggggctctgagactacttactactcttcatccctcaagtcacgcgtcaccatctcaaaggacaactctaagaatcaggtgtcactgaaactgtcatctgtgaccgcagccgacaccgccgtgtactattgcgctaagcattactattatggcgggagctacgcaatggattactggggacagggtactctggtcaccgtgtccagcaccactaccccagcaccgaggccacccaccccggctcctaccatcgcctcccagcctctgtccctgcgtccggaggcatgtagacccgcagctggtggggccgtgcatacccggggtcttgacttcgcctgcgatatctacatttgggcccctctggctggtacttgcggggtcctgctgctttcactcgtgatcactctttactgtaagcgcggtcggaagaagctgctgtacatctttaagcaacccttcatgaggcctgtgcagactactcaagaggaggacggctgttcatgccggttcccagaggaggaggaaggcggctgcgaactgcgcgtgaaattcagccgcagcgcagatgctccagcctaccagcaggggcagaaccagctctacaacgaactcaatcttggtcggagagaggagtacgacgtgctggacaagcggagaggacgggacccagaaatgggcgggaagccgcgcagaaagaatccccaagagggcctgtacaacgagctccaaaaggataagatggcagaagcctatagcgagattggtatgaaaggggaacgcagaagaggcaaaggccacgacggactgtaccagggactcagcaccgccaccaaggacacctatgacgctcttcacatgcaggccctgccgcctcgg

SEQ ID NO: 1088 - DNA, 2238 bp, Artificial Sequence
  source: /note="Description of Artificial Sequence: Synthetic polynucleotide"
atggccctccctgtcaccgccctgctgcttccgctggctcttctgctccacgccgctcggcccgagtcgttggcactttccctgactgccgaccagatggtgtccgcccttctggacgccgagcctccaattctgtactcggagtacgatccgactcgcccgttctccgaagccagcatgatgggcctgttgactaacctggcggaccgcgagttggtgcacatgattaactgggctaagcgggtgccgggcttcgtggacctggccctgcacgaccaagtgcacctcctggaatgcgcctggatggaaatcctcatgatcggcctcgtgtggagatccatggagcatcccggaaagctcctgtttgcacccaacctcctgcttgatcgcaaccagggaaaatgcgtggaagggggtgtcgagattttcgacatgctgctcgccacctcttcccggttccggatgatgaatctgcagggagaagagttcgtgtgtctgaagtcaatcatcctgctgaactccggggtctataccttcctgagctcgaccctcaagtcactggaggaaaaagaccacatccatcgcgtgctcgataagatcaccgacacccttatccatctcatggcgaaggctggactgaccctgcaacagcagcaccagaggctggcccagttgctgctgattctgagccacatccggcacatgtcgtccaagaggatggaacacctgtacagcatgaagtgcaagaacgtcgtgcctctgtccgatctgctcctggaaatgctggacgcgcacagactcgggacgggagctgaagatccacgacccagcagaaagcgacgggaaattgtgatgacccagtcacccgccactcttagcctttcacccggtgagcgcgcaaccctgtcttgcagagcctcccaagacatctcaaaataccttaattggtatcaacagaagcccggacaggctcctcgccttctgatctaccacaccagccggctccattctggaatccctgccaggttcagcggtagcggatctgggaccgactacaccctcactatcagctcactgcagccagaggacttcgctgtctatttctgtcagcaagggaacaccctgccctacacctttggacagggcaccaagctcgagattaaaggtggaggtggcagcggaggaggtgggtccggcggtggaggaagccaggtccaactccaagaaagcggaccgggtcttgtgaagccatcagaaactctttcactgacttgtactgtgagcggagtgtctctccccgattacggggtgtcttggatcagacagccaccggggaagggtctggaatggattggagtgatttggggctctgagactacttactactcttcatccctcaagtcacgcgtcaccatctcaaaggacaactctaagaatcaggtgtcactgaaactgtcatctgtgaccgcagccgacaccgccgtgtactattgcgctaagcattactattatggcgggagctacgcaatggattactggggacagggtactctggtcaccgtgtccagcaccactaccccagcaccgaggccacccaccccggctcctaccatcgcctcccagcctctgtccctgcgtccggaggcatgtagacccgcagctggtggggccgtgcatacccggggtcttgacttcgcctgcgatatctacatttgggcccctctggctggtacttgcggggtcctgctgctttcactcgtgatcactctttactgtaagcgcggtcggaagaagctgctgtacatctttaagcaacccttcatgaggcctgtgcagactactcaagaggaggacggctgttcatgccggttcccagaggaggaggaaggcggctgcgaactgcgcgtgaaattcagccgcagcgcagatgctccagcctaccagcaggggcagaaccagctctacaacgaactcaatcttggtcggagagaggagtacgacgtgctggacaagcggagaggacgggacccagaaatgggcgggaagccgcgcagaaagaatccccaagagggcctgtacaacgagctccaaaaggataagatggcagaagcctatagcgagattggtatgaaaggggaacgcagaagaggcaaaggccacgacggactgtaccagggactcagcaccgccaccaaggacacctatgacgctcttcacatgcaggccctgccgcctcgg

SEQ ID NO: 1089 - DNA, 2238 bp, Artificial Sequence
  source: /note="Description of Artificial Sequence: Synthetic polynucleotide"
atggccctccctgtcaccgccctgctgcttccgctggctcttctgctccacgccgctcggcccgagtcgttggcactttccctgactgccgaccagatggtgtccgcccttctggacgccgagcctccaattctgtactcggagtacgatccgactcgcccgttctccgaagccagcatgatgggcctgttgactaacctggcggaccgcgagttggtgcacatgattaactgggctaagcgggtgccgggcttcgtggacctgaccctgcacgaccaagtgcacctcctggaatgcgcctggatggaaatcctcatgatcggcctcgtgtggagatccatggagcatcccggaaagctcctgtttgcacccaacctcctgcttgatcgcaaccagggaaaatgcgtggaagggggtgtcgagattttcgacatgctgctcgccacctcttcccggttccggatgatgaatctgcagggagaagagttcgtgtgtctgaagtcaatcatcctgctgaactccggggtctataccttcctgagctcgaccctcaagtcactggaggaaaaagaccacatccatcgcgtgctcgataagatcaccgacacccttatccatctcatggcgaaggctggactgaccctgcaacagcagcaccagaggctggcccagttgctgctgattctgagccacatccggcacatgtcgaacaagaggatggaacacctgtacagcatgaagtgcaagaacgtcgtgcctctgtccgatctgctcctggaaatgctggacgcgcacagactcgggacgggagctgaagatccacgacccagcagaaagcgacgggaaattgtgatgacccagtcacccgccactcttagcctttcacccggtgagcgcgcaaccctgtcttgcagagcctcccaagacatctcaaaataccttaattggtatcaacagaagcccggacaggctcctcgccttctgatctaccacaccagccggctccattctggaatccctgccaggttcagcggtagcggatctgggaccgactacaccctcactatcagctcactgcagccagaggacttcgctgtctatttctgtcagcaagggaacaccctgccctacacctttggacagggcaccaagctcgagattaaaggtggaggtggcagcggaggaggtgggtccggcggtggaggaagccaggtccaactccaagaaagcggaccgggtcttgtgaagccatcagaaactctttcactgacttgtactgtgagcggagtgtctctccccgattacggggtgtcttggatcagacagccaccggggaagggtctggaatggattggagtgatttggggctctgagactacttactactcttcatccctcaagtcacgcgtcaccatctcaaaggacaactctaagaatcaggtgtcactgaaactgtcatctgtgaccgcagccgacaccgccgtgtactattgcgctaagcattactattatggcgggagctacgcaatggattactggggacagggtactctggtcaccgtgtccagcaccactaccccagcaccgaggccacccaccccggctcctaccatcgcctcccagcctctgtccctgcgtccggaggcatgtagacccgcagctggtggggccgtgcatacccggggtcttgacttcgcctgcgatatctacatttgggcccctctggctggtacttgcggggtcctgctgctttcactcgtgatcactctttactgtaagcgcggtcggaagaagctgctgtacatctttaagcaacccttcatgaggcctgtgcagactactcaagaggaggacggctgttcatgccggttcccagaggaggaggaaggcggctgcgaactgcgcgtgaaattcagccgcagcgcagatgctccagcctaccagcaggggcagaaccagctctacaacgaactcaatcttggtcggagagaggagtacgacgtgctggacaagcggagaggacgggacccagaaatgggcgggaagccgcgcagaaagaatccccaagagggcctgtacaacgagctccaaaaggataagatggcagaagcctatagcgagattggtatgaaaggggaacgcagaagaggcaaaggccacgacggactgtaccagggactcagcaccgccaccaaggacacctatgacgctcttcacatgcaggccctgccgcctcgg

SEQ ID NO: 1090 - DNA, 2259 bp, Artificial Sequence
  source: /note="Description of Artificial Sequence: Synthetic polynucleotide"
atggccctccctgtcaccgccctgctgcttccgctggctcttctgctccacgccgctcggcccgagtcgttggcactttccctgactgccgaccagatggtgtccgcccttctggacgccgagcctccaattctgtactcggagtacgatccgactcgcccgttctccgaagccagcatgatgggcctgttgactaacctggcggaccgcgagttggtgcacatgattaactgggctaagcgggtgccgggcttcgtggacctggccctgcacgaccaagtgcacctcctggaatgcgcctggatggaaatcctcatgatcggcctcgtgtggagatccatggagcatcccggaaagctcctgtttgcacccaacctcctgcttgatcgcaaccagggaaaatgcgtggaagggggtgtcgagattttcgacatgctgctcgccacctcttcccggttccggatgatgaatctgcagggagaagagttcgtgtgtctgaagtcaatcatcctgctgaactccggggtctataccttcctgagctcgaccctcaagtcactggaggaaaaagaccacatccatcgcgtgctcgataagatcaccgacacccttatccatctcatggcgaaggctggactgaccctgcaacagcagcaccagaggctggcccagttgctgctgattctgagccacatccggcacatgtcgtccaagaggatggaacacctgtacagcatgaagtgcaagaacgtcgtgcctctgtccgatctgctcctggaaatgctggacgcgcacagactcggaaccggcgcggaagacccccggccctccaggaagcgaaggtccctcggagacgtgggtcaagtgcaactcgtccaaagcggagcggaagtcaagaaacccggagcgagcgtgaaagtgtcctgcaaagcctccggctacacctttacgggctactacatgcactgggtgcgccaggcaccaggacagggtcttgaatggatgggatggatcaaccctaattcgggcggaactaactacgcacagaagttccaggggagagtgactctgactcgggatacctccatctcaactgtctacatggaactctcccgcttgcggtcagatgatacggcagtgtactactgcgcccgcgacatgaatatcctggctaccgtgccgttcgacatctggggacaggggactatggttactgtctcatcgggcggtggaggttcaggaggaggcggctcgggaggcggaggttcggacattcagatgacccagtccccatcctctctgtcggccagcgtcggagatagggtgaccattacctgtcgggcctcgcaaagcatctcctcgtacctcaactggtatcagcaaaagccgggaaaggcgcctaagctgctgatctacgccgcttcgagcttgcaaagcggggtgccatccagattctcgggatcaggctcaggaaccgacttcaccctgaccgtgaacagcctccagccggaggactttgccacttactactgccagcagggagactccgtgccgcttactttcggggggggtacccgcctggagatcaagaccactaccccagcaccgaggccacccaccccggctcctaccatcgcctcccagcctctgtccctgcgtccggaggcatgtagacccgcagctggtggggccgtgcatacccggggtcttgacttcgcctgcgatatctacatttgggcccctctggctggtacttgcggggtcctgctgctttcactcgtgatcactctttactgtaagcgcggtcggaagaagctgctgtacatctttaagcaacccttcatgaggcctgtgcagactactcaagaggaggacggctgttcatgccggttcccagaggaggaggaaggcggctgcgaactgcgcgtgaaattcagccgcagcgcagatgctccagcctaccagcaggggcagaaccagctctacaacgaactcaatcttggtcggagagaggagtacgacgtgctggacaagcggagaggacgggacccagaaatgggcgggaagccgcgcagaaagaatccccaagagggcctgtacaacgagctccaaaaggataagatggcagaagcctatagcgagattggtatgaaaggggaacgcagaagaggcaaaggccacgacggactgtaccagggactcagcaccgccaccaaggacacctatgacgctcttcacatgcaggccctgccgcctcgg

SEQ ID NO: 1091 - DNA, 2259 bp, Artificial Sequence
  source: /note="Description of Artificial Sequence: Synthetic polynucleotide"
atggccctccctgtcaccgccctgctgcttccgctggctcttctgctccacgccgctcggcccgagtcgttggcactttccctgactgccgaccagatggtgtccgcccttctggacgccgagcctccaattctgtactcggagtacgatccgactcgcccgttctccgaagccagcatgatgggcctgttgactaacctggcggaccgcgagttggtgcacatgattaactgggctaagcgggtgccgggcttcgtggacctgaccctgcacgaccaagtgcacctcctggaatgcgcctggatggaaatcctcatgatcggcctcgtgtggagatccatggagcatcccggaaagctcctgtttgcacccaacctcctgcttgatcgcaaccagggaaaatgcgtggaagggggtgtcgagattttcgacatgctgctcgccacctcttcccggttccggatgatgaatctgcagggagaagagttcgtgtgtctgaagtcaatcatcctgctgaactccggggtctataccttcctgagctcgaccctcaagtcactggaggaaaaagaccacatccatcgcgtgctcgataagatcaccgacacccttatccatctcatggcgaaggctggactgaccctgcaacagcagcaccagaggctggcccagttgctgctgattctgagccacatccggcacatgtcgaacaagaggatggaacacctgtacagcatgaagtgcaagaacgtcgtgcctctgtccgatctgctcctggaaatgctggacgcgcacagactcggaaccggcgcggaagacccccggccctccaggaagcgaaggtccctcggagacgtgggtcaagtgcaactcgtccaaagcggagcggaagtcaagaaacccggagcgagcgtgaaagtgtcctgcaaagcctccggctacacctttacgggctactacatgcactgggtgcgccaggcaccaggacagggtcttgaatggatgggatggatcaaccctaattcgggcggaactaactacgcacagaagttccaggggagagtgactctgactcgggatacctccatctcaactgtctacatggaactctcccgcttgcggtcagatgatacggcagtgtactactgcgcccgcgacatgaatatcctggctaccgtgccgttcgacatctggggacaggggactatggttactgtctcatcgggcggtggaggttcaggaggaggcggctcgggaggcggaggttcggacattcagatgacccagtccccatcctctctgtcggccagcgtcggagatagggtgaccattacctgtcgggcctcgcaaagcatctcctcgtacctcaactggtatcagcaaaagccgggaaaggcgcctaagctgctgatctacgccgcttcgagcttgcaaagcggggtgccatccagattctcgggatcaggctcaggaaccgacttcaccctgaccgtgaacagcctccagccggaggactttgccacttactactgccagcagggagactccgtgccgcttactttcggggggggtacccgcctggagatcaagaccactaccccagcaccgaggccacccaccccggctcctaccatcgcctcccagcctctgtccctgcgtccggaggcatgtagacccgcagctggtggggccgtgcatacccggggtcttgacttcgcctgcgatatctacatttgggcccctctggctggtacttgcggggtcctgctgctttcactcgtgatcactctttactgtaagcgcggtcggaagaagctgctgtacatctttaagcaacccttcatgaggcctgtgcagactactcaagaggaggacggctgttcatgccggttcccagaggaggaggaaggcggctgcgaactgcgcgtgaaattcagccgcagcgcagatgctccagcctaccagcaggggcagaaccagctctacaacgaactcaatcttggtcggagagaggagtacgacgtgctggacaagcggagaggacgggacccagaaatgggcgggaagccgcgcagaaagaatccccaagagggcctgtacaacgagctccaaaaggataagatggcagaagcctatagcgagattggtatgaaaggggaacgcagaagaggcaaaggccacgacggactgtaccagggactcagcaccgccaccaaggacacctatgacgctcttcacatgcaggccctgccgcctcgg

SEQ ID NO: 1092 - DNA, 2241 bp, Artificial Sequence
  source: /note="Description of Artificial Sequence: Synthetic polynucleotide"
atggccctccctgtcaccgccctgctgcttccgctggctcttctgctccacgccgctcggcccgagtcgttggcactttccctgactgccgaccagatggtgtccgcccttctggacgccgagcctccaattctgtactcggagtacgatccgactcgcccgttctccgaagccagcatgatgggcctgttgactaacctggcggaccgcgagttggtgcacatgattaactgggctaagcgggtgccgggcttcgtggacctggccctgcacgaccaagtgcacctcctggaatgcgcctggatggaaatcctcatgatcggcctcgtgtggagatccatggagcatcccggaaagctcctgtttgcacccaacctcctgcttgatcgcaaccagggaaaatgcgtggaagggggtgtcgagattttcgacatgctgctcgccacctcttcccggttccggatgatgaatctgcagggagaagagttcgtgtgtctgaagtcaatcatcctgctgaactccggggtctataccttcctgagctcgaccctcaagtcactggaggaaaaagaccacatccatcgcgtgctcgataagatcaccgacacccttatccatctcatggcgaaggctggactgaccctgcaacagcagcaccagaggctggcccagttgctgctgattctgagccacatccggcacatgtcgtccaagaggatggaacacctgtacagcatgaagtgcaagaacgtcgtgcctctgtccgatctgctcctggaaatgctggacgcgcacagactcggaaccggcgcggaagacccccggccctccaggaagcgaaggcaagtgcaactcgtccaaagcggagcggaagtcaagaaacccggagcgagcgtgaaagtgtcctgcaaagcctccggctacacctttacgggctactacatgcactgggtgcgccaggcaccaggacagggtcttgaatggatgggatggatcaaccctaattcgggcggaactaactacgcacagaagttccaggggagagtgactctgactcgggatacctccatctcaactgtctacatggaactctcccgcttgcggtcagatgatacggcagtgtactactgcgcccgcgacatgaatatcctggctaccgtgccgttcgacatctggggacaggggactatggttactgtctcatcgggcggtggaggttcaggaggaggcggctcgggaggcggaggttcggacattcagatgacccagtccccatcctctctgtcggccagcgtcggagatagggtgaccattacctgtcgggcctcgcaaagcatctcctcgtacctcaactggtatcagcaaaagccgggaaaggcgcctaagctgctgatctacgccgcttcgagcttgcaaagcggggtgccatccagattctcgggatcaggctcaggaaccgacttcaccctgaccgtgaacagcctccagccggaggactttgccacttactactgccagcagggagactccgtgccgcttactttcggggggggtacccgcctggagatcaagaccactaccccagcaccgaggccacccaccccggctcctaccatcgcctcccagcctctgtccctgcgtccggaggcatgtagacccgcagctggtggggccgtgcatacccggggtcttgacttcgcctgcgatatctacatttgggcccctctggctggtacttgcggggtcctgctgctttcactcgtgatcactctttactgtaagcgcggtcggaagaagctgctgtacatctttaagcaacccttcatgaggcctgtgcagactactcaagaggaggacggctgttcatgccggttcccagaggaggaggaaggcggctgcgaactgcgcgtgaaattcagccgcagcgcagatgctccagcctaccagcaggggcagaaccagctctacaacgaactcaatcttggtcggagagaggagtacgacgtgctggacaagcggagaggacgggacccagaaatgggcgggaagccgcgcagaaagaatccccaagagggcctgtacaacgagctccaaaaggataagatggcagaagcctatagcgagattggtatgaaaggggaacgcagaagaggcaaaggccacgacggactgtaccagggactcagcaccgccaccaaggacacctatgacgctcttcacatgcaggccctgccgcctcgg

SEQ ID NO: 1093 - DNA, 2241 bp, Artificial Sequence
  source: /note="Description of Artificial Sequence: Synthetic polynucleotide"
atggccctccctgtcaccgccctgctgcttccgctggctcttctgctccacgccgctcggcccgagtcgttggcactttccctgactgccgaccagatggtgtccgcccttctggacgccgagcctccaattctgtactcggagtacgatccgactcgcccgttctccgaagccagcatgatgggcctgttgactaacctggcggaccgcgagttggtgcacatgattaactgggctaagcgggtgccgggcttcgtggacctgaccctgcacgaccaagtgcacctcctggaatgcgcctggatggaaatcctcatgatcggcctcgtgtggagatccatggagcatcccggaaagctcctgtttgcacccaacctcctgcttgatcgcaaccagggaaaatgcgtggaagggggtgtcgagattttcgacatgctgctcgccacctcttcccggttccggatgatgaatctgcagggagaagagttcgtgtgtctgaagtcaatcatcctgctgaactccggggtctataccttcctgagctcgaccctcaagtcactggaggaaaaagaccacatccatcgcgtgctcgataagatcaccgacacccttatccatctcatggcgaaggctggactgaccctgcaacagcagcaccagaggctggcccagttgctgctgattctgagccacatccggcacatgtcgaacaagaggatggaacacctgtacagcatgaagtgcaagaacgtcgtgcctctgtccgatctgctcctggaaatgctggacgcgcacagactcgggacgggagctgaagatccacgacccagcagaaagcgacggcaagtgcaactcgtccaaagcggagcggaagtcaagaaacccggagcgagcgtgaaagtgtcctgcaaagcctccggctacacctttacgggctactacatgcactgggtgcgccaggcaccaggacagggtcttgaatggatgggatggatcaaccctaattcgggcggaactaactacgcacagaagttccaggggagagtgactctgactcgggatacctccatctcaactgtctacatggaactctcccgcttgcggtcagatgatacggcagtgtactactgcgcccgcgacatgaatatcctggctaccgtgccgttcgacatctggggacaggggactatggttactgtctcatcgggcggtggaggttcaggaggaggcggctcgggaggcggaggttcggacattcagatgacccagtccccatcctctctgtcggccagcgtcggagatagggtgaccattacctgtcgggcctcgcaaagcatctcctcgtacctcaactggtatcagcaaaagccgggaaaggcgcctaagctgctgatctacgccgcttcgagcttgcaaagcggggtgccatccagattctcgggatcaggctcaggaaccgacttcaccctgaccgtgaacagcctccagccggaggactttgccacttactactgccagcagggagactccgtgccgcttactttcggggggggtacccgcctggagatcaagaccactaccccagcaccgaggccacccaccccggctcctaccatcgcctcccagcctctgtccctgcgtccggaggcatgtagacccgcagctggtggggccgtgcatacccggggtcttgacttcgcctgcgatatctacatttgggcccctctggctggtacttgcggggtcctgctgctttcactcgtgatcactctttactgtaagcgcggtcggaagaagctgctgtacatctttaagcaacccttcatgaggcctgtgcagactactcaagaggaggacggctgttcatgccggttcccagaggaggaggaaggcggctgcgaactgcgcgtgaaattcagccgcagcgcagatgctccagcctaccagcaggggcagaaccagctctacaacgaactcaatcttggtcggagagaggagtacgacgtgctggacaagcggagaggacgggacccagaaatgggcgggaagccgcgcagaaagaatccccaagagggcctgtacaacgagctccaaaaggataagatggcagaagcctatagcgagattggtatgaaaggggaacgcagaagaggcaaaggccacgacggactgtaccagggactcagcaccgccaccaaggacacctatgacgctcttcacatgcaggccctgccgcctcgg

SEQ ID NO: 1094 - DNA, 2247 bp, Artificial Sequence
  source: /note="Description of Artificial Sequence: Synthetic polynucleotide"
atggccctccctgtcaccgccctgctgcttccgctggctcttctgctccacgccgctcggcccgagtcgttggcactttccctgactgccgaccagatggtgtccgcccttctggacgccgagcctccaattctgtactcggagtacgatccgactcgcccgttctccgaagccagcatgatgggcctgttgactaacctggcggaccgcgagttggtgcacatgattaactgggctaagcgggtgccgggcttcgtggacctggccctgcacgaccaagtgcacctcctggaatgcgcctggatggaaatcctcatgatcggcctcgtgtggagatccatggagcatcccggaaagctcctgtttgcacccaacctcctgcttgatcgcaaccagggaaaatgcgtggaagggggtgtcgagattttcgacatgctgctcgccacctcttcccggttccggatgatgaatctgcagggagaagagttcgtgtgtctgaagtcaatcatcctgctgaactccggggtctataccttcctgagctcgaccctcaagtcactggaggaaaaagaccacatccatcgcgtgctcgataagatcaccgacacccttatccatctcatggcgaaggctggactgaccctgcaacagcagcaccagaggctggcccagttgctgctgattctgagccacatccggcacatgtcgtccaagaggatggaacacctgtacagcatgaagtgcaagaacgtcgtgcctctgtccgatctgctcctggaaatgctggacgcgcacagactcggaaccggcgcggaagacccccggccctccaggaagcgaaggtccctcggagacgtgggtgaagtgcaattggtggaatcagggggaggacttgtgcagcctggaggatcgctgagactgtcatgtgccgtgtccggctttgccctgtccaaccacgggatgtcctgggtccgccgcgcgcctggaaagggcctcgaatgggtgtcgggtattgtgtacagcggtagcacctactatgccgcatccgtgaaggggagattcaccatcagccgggacaactccaggaacactctgtacctccaaatgaattcgctgaggccagaggacactgccatctactactgctccgcgcatggcggagagtccgacgtctggggacaggggaccaccgtgaccgtgtctagcgcgtccggcggaggcggcagcgggggtcgggcatcagggggcggcggatcggacatccagctcacccagtccccgagctcgctgtccgcctccgtgggagatcgggtcaccatcacgtgccgcgccagccagtcgatttcctcctacctgaactggtaccaacagaagcccggaaaagccccgaagcttctcatctacgccgcctcgagcctgcagtcaggagtgccctcacggttctccggctccggttccggtactgatttcaccctgaccatttcctccctgcaaccggaggacttcgctacttactactgccagcagtcgtactccaccccctacactttcggacaaggcaccaaggtcgaaatcaagaccactaccccagcaccgaggccacccaccccggctcctaccatcgcctcccagcctctgtccctgcgtccggaggcatgtagacccgcagctggtggggccgtgcatacccggggtcttgacttcgcctgcgatatctacatttgggcccctctggctggtacttgcggggtcctgctgctttcactcgtgatcactctttactgtaagcgcggtcggaagaagctgctgtacatctttaagcaacccttcatgaggcctgtgcagactactcaagaggaggacggctgttcatgccggttcccagaggaggaggaaggcggctgcgaactgcgcgtgaaattcagccgcagcgcagatgctccagcctaccagcaggggcagaaccagctctacaacgaactcaatcttggtcggagagaggagtacgacgtgctggacaagcggagaggacgggacccagaaatgggcgggaagccgcgcagaaagaatccccaagagggcctgtacaacgagctccaaaaggataagatggcagaagcctatagcgagattggtatgaaaggggaacgcagaagaggcaaaggccacgacggactgtaccagggactcagcaccgccaccaaggacacctatgacgctcttcacatgcaggccctgccgcctcgg

SEQ ID NO: 1095 - DNA, 2247 bp, Artificial Sequence
  source: /note="Description of Artificial Sequence: Synthetic polynucleotide"
atggccctccctgtcaccgccctgctgcttccgctggctcttctgctccacgccgctcggcccgagtcgttggcactttccctgactgccgaccagatggtgtccgcccttctggacgccgagcctccaattctgtactcggagtacgatccgactcgcccgttctccgaagccagcatgatgggcctgttgactaacctggcggaccgcgagttggtgcacatgattaactgggctaagcgggtgccgggcttcgtggacctgaccctgcacgaccaagtgcacctcctggaatgcgcctggatggaaatcctcatgatcggcctcgtgtggagatccatggagcatcccggaaagctcctgtttgcacccaacctcctgcttgatcgcaaccagggaaaatgcgtggaagggggtgtcgagattttcgacatgctgctcgccacctcttcccggttccggatgatgaatctgcagggagaagagttcgtgtgtctgaagtcaatcatcctgctgaactccggggtctataccttcctgagctcgaccctcaagtcactggaggaaaaagaccacatccatcgcgtgctcgataagatcaccgacacccttatccatctcatggcgaaggctggactgaccctgcaacagcagcaccagaggctggcccagttgctgctgattctgagccacatccggcacatgtcgaacaagaggatggaacacctgtacagcatgaagtgcaagaacgtcgtgcctctgtccgatctgctcctggaaatgctggacgcgcacagactcggaaccggcgcggaagacccccggccctccaggaagcgaaggtccctcggagacgtgggtgaagtgcaattggtggaatcagggggaggacttgtgcagcctggaggatcgctgagactgtcatgtgccgtgtccggctttgccctgtccaaccacgggatgtcctgggtccgccgcgcgcctggaaagggcctcgaatgggtgtcgggtattgtgtacagcggtagcacctactatgccgcatccgtgaaggggagattcaccatcagccgggacaactccaggaacactctgtacctccaaatgaattcgctgaggccagaggacactgccatctactactgctccgcgcatggcggagagtccgacgtctggggacaggggaccaccgtgaccgtgtctagcgcgtccggcggaggcggcagcgggggtcgggcatcagggggcggcggatcggacatccagctcacccagtccccgagctcgctgtccgcctccgtgggagatcgggtcaccatcacgtgccgcgccagccagtcgatttcctcctacctgaactggtaccaacagaagcccggaaaagccccgaagcttctcatctacgccgcctcgagcctgcagtcaggagtgccctcacggttctccggctccggttccggtactgatttcaccctgaccatttcctccctgcaaccggaggacttcgctacttactactgccagcagtcgtactccaccccctacactttcggacaaggcaccaaggtcgaaatcaagaccactaccccagcaccgaggccacccaccccggctcctaccatcgcctcccagcctctgtccctgcgtccggaggcatgtagacccgcagctggtggggccgtgcatacccggggtcttgacttcgcctgcgatatctacatttgggcccctctggctggtacttgcggggtcctgctgctttcactcgtgatcactctttactgtaagcgcggtcggaagaagctgctgtacatctttaagcaacccttcatgaggcctgtgcagactactcaagaggaggacggctgttcatgccggttcccagaggaggaggaaggcggctgcgaactgcgcgtgaaattcagccgcagcgcagatgctccagcctaccagcaggggcagaaccagctctacaacgaactcaatcttggtcggagagaggagtacgacgtgctggacaagcggagaggacgggacccagaaatgggcgggaagccgcgcagaaagaatccccaagagggcctgtacaacgagctccaaaaggataagatggcagaagcctatagcgagattggtatgaaaggggaacgcagaagaggcaaaggccacgacggactgtaccagggactcagcaccgccaccaaggacacctatgacgctcttcacatgcaggccctgccgcctcgg

SEQ ID NO: 1096 - DNA, 2229 bp, Artificial Sequence
  source: /note="Description of Artificial Sequence: Synthetic polynucleotide"
atggccctccctgtcaccgccctgctgcttccgctggctcttctgctccacgccgctcggcccgagtcgttggcactttccctgactgccgaccagatggtgtccgcccttctggacgccgagcctccaattctgtactcggagtacgatccgactcgcccgttctccgaagccagcatgatgggcctgttgactaacctggcggaccgcgagttggtgcacatgattaactgggctaagcgggtgccgggcttcgtggacctggccctgcacgaccaagtgcacctcctggaatgcgcctggatggaaatcctcatgatcggcctcgtgtggagatccatggagcatcccggaaagctcctgtttgcacccaacctcctgcttgatcgcaaccagggaaaatgcgtggaagggggtgtcgagattttcgacatgctgctcgccacctcttcccggttccggatgatgaatctgcagggagaagagttcgtgtgtctgaagtcaatcatcctgctgaactccggggtctataccttcctgagctcgaccctcaagtcactggaggaaaaagaccacatccatcgcgtgctcgataagatcaccgacacccttatccatctcatggcgaaggctggactgaccctgcaacagcagcaccagaggctggcccagttgctgctgattctgagccacatccggcacatgtcgtccaagaggatggaacacctgtacagcatgaagtgcaagaacgtcgtgcctctgtccgatctgctcctggaaatgctggacgcgcacagactcgggacgggagctgaagatccacgacccagcagaaagcgacgggaagtgcaattggtggaatcagggggaggacttgtgcagcctggaggatcgctgagactgtcatgtgccgtgtccggctttgccctgtccaaccacgggatgtcctgggtccgccgcgcgcctggaaagggcctcgaatgggtgtcgggtattgtgtacagcggtagcacctactatgccgcatccgtgaaggggagattcaccatcagccgggacaactccaggaacactctgtacctccaaatgaattcgctgaggccagaggacactgccatctactactgctccgcgcatggcggagagtccgacgtctggggacaggggaccaccgtgaccgtgtctagcgcgtccggcggaggcggcagcgggggtcgggcatcagggggcggcggatcggacatccagctcacccagtccccgagctcgctgtccgcctccgtgggagatcgggtcaccatcacgtgccgcgccagccagtcgatttcctcctacctgaactggtaccaacagaagcccggaaaagccccgaagcttctcatctacgccgcctcgagcctgcagtcaggagtgccctcacggttctccggctccggttccggtactgatttcaccctgaccatttcctccctgcaaccggaggacttcgctacttactactgccagcagtcgtactccaccccctacactttcggacaaggcaccaaggtcgaaatcaagaccactaccccagcaccgaggccacccaccccggctcctaccatcgcctcccagcctctgtccctgcgtccggaggcatgtagacccgcagctggtggggccgtgcatacccggggtcttgacttcgcctgcgatatctacatttgggcccctctggctggtacttgcggggtcctgctgctttcactcgtgatcactctttactgtaagcgcggtcggaagaagctgctgtacatctttaagcaacccttcatgaggcctgtgcagactactcaagaggaggacggctgttcatgccggttcccagaggaggaggaaggcggctgcgaactgcgcgtgaaattcagccgcagcgcagatgctccagcctaccagcaggggcagaaccagctctacaacgaactcaatcttggtcggagagaggagtacgacgtgctggacaagcggagaggacgggacccagaaatgggcgggaagccgcgcagaaagaatccccaagagggcctgtacaacgagctccaaaaggataagatggcagaagcctatagcgagattggtatgaaaggggaacgcagaagaggcaaaggccacgacggactgtaccagggactcagcaccgccaccaaggacacctatgacgctcttcacatgcaggccctgccgcctcgg

SEQ ID NO: 1097 - DNA, 2229 bp, Artificial Sequence
  source: /note="Description of Artificial Sequence: Synthetic polynucleotide"
atggccctccctgtcaccgccctgctgcttccgctggctcttctgctccacgccgctcggcccgagtcgttggcactttccctgactgccgaccagatggtgtccgcccttctggacgccgagcctccaattctgtactcggagtacgatccgactcgcccgttctccgaagccagcatgatgggcctgttgactaacctggcggaccgcgagttggtgcacatgattaactgggctaagcgggtgccgggcttcgtggacctgaccctgcacgaccaagtgcacctcctggaatgcgcctggatggaaatcctcatgatcggcctcgtgtggagatccatggagcatcccggaaagctcctgtttgcacccaacctcctgcttgatcgcaaccagggaaaatgcgtggaagggggtgtcgagattttcgacatgctgctcgccacctcttcccggttccggatgatgaatctgcagggagaagagttcgtgtgtctgaagtcaatcatcctgctgaactccggggtctataccttcctgagctcgaccctcaagtcactggaggaaaaagaccacatccatcgcgtgctcgataagatcaccgacacccttatccatctcatggcgaaggctggactgaccctgcaacagcagcaccagaggctggcccagttgctgctgattctgagccacatccggcacatgtcgaacaagaggatggaacacctgtacagcatgaagtgcaagaacgtcgtgcctctgtccgatctgctcctggaaatgctggacgcgcacagactcgggacgggagctgaagatccacgacccagcagaaagcgacgggaagtgcaattggtggaatcagggggaggacttgtgcagcctggaggatcgctgagactgtcatgtgccgtgtccggctttgccctgtccaaccacgggatgtcctgggtccgccgcgcgcctggaaagggcctcgaatgggtgtcgggtattgtgtacagcggtagcacctactatgccgcatccgtgaaggggagattcaccatcagccgggacaactccaggaacactctgtacctccaaatgaattcgctgaggccagaggacactgccatctactactgctccgcgcatggcggagagtccgacgtctggggacaggggaccaccgtgaccgtgtctagcgcgtccggcggaggcggcagcgggggtcgggcatcagggggcggcggatcggacatccagctcacccagtccccgagctcgctgtccgcctccgtgggagatcgggtcaccatcacgtgccgcgccagccagtcgatttcctcctacctgaactggtaccaacagaagcccggaaaagccccgaagcttctcatctacgccgcctcgagcctgcagtcaggagtgccctcacggttctccggctccggttccggtactgatttcaccctgaccatttcctccctgcaaccggaggacttcgctacttactactgccagcagtcgtactccaccccctacactttcggacaaggcaccaaggtcgaaatcaagaccactaccccagcaccgaggccacccaccccggctcctaccatcgcctcccagcctctgtccctgcgtccggaggcatgtagacccgcagctggtggggccgtgcatacccggggtcttgacttcgcctgcgatatctacatttgggcccctctggctggtacttgcggggtcctgctgctttcactcgtgatcactctttactgtaagcgcggtcggaagaagctgctgtacatctttaagcaacccttcatgaggcctgtgcagactactcaagaggaggacggctgttcatgccggttcccagaggaggaggaaggcggctgcgaactgcgcgtgaaattcagccgcagcgcagatgctccagcctaccagcaggggcagaaccagctctacaacgaactcaatcttggtcggagagaggagtacgacgtgctggacaagcggagaggacgggacccagaaatgggcgggaagccgcgcagaaagaatccccaagagggcctgtacaacgagctccaaaaggataagatggcagaagcctatagcgagattggtatgaaaggggaacgcagaagaggcaaaggccacgacggactgtaccagggactcagcaccgccaccaaggacacctatgacgctcttcacatgcaggccctgccgcctcgg

SEQ ID NO: 1098 - DNA, 2256 bp, Artificial Sequence
  source: /note="Description of Artificial Sequence: Synthetic polynucleotide"
atggccctccctgtcaccgccctgctgcttccgctggctcttctgctccacgccgctcggccccagtcgttggcactttccctgactgccgaccagatggtgtccgcccttctggacgccgagcctccaattctgtactcggagtacgatccgactcgcccgttctccgaagccagcatgatgggcctgttgactaacctggcggaccgcgagttggtgcacatgattaactgggctaagcgggtgccgggcttcgtggacctggccctgcacgaccaagtgcacctcctggaatgcgcctggatggaaatcctcatgatcggcctcgtgtggagatccatggagcatcccggaaagctcctgtttgcacccaacctcctgcttgatcgcaaccagggaaaatgcgtggaagggggtgtcgagattttcgacatgctgctcgccacctcttcccggttccggatgatgaatctgcagggagaagagttcgtgtgtctgaagtcaatcatcctgctgaactccggggtctataccttcctgagctcgaccctcaagtcactggaggaaaaagaccacatccatcgcgtgctcgataagatcaccgacacccttatccatctcatggcgaaggctggactgaccctgcaacagcagcaccagaggctggcccagttgctgctgattctgagccacatccggcacatgtcgtccaagaggatggaacacctgtacagcatgaagtgcaagaacgtcgtgcctctgtccgatctgctcctggaaatgctggacgcgcacagactcggaaccggcgcggaagacccccggccctccaggaagcgaaggtccctcggagacgtgggtgaaattgtgatgacccagtcacccgccactcttagcctttcacccggtgagcgcgcaaccctgtcttgcagagcctcccaagacatctcaaaataccttaattggtatcaacagaagcccggacaggctcctcgccttctgatctaccacaccagccggctccattctggaatccctgccaggttcagcggtagcggatctgggaccgactacaccctcactatcagctcactgcagccagaggacttcgctgtctatttctgtcagcaagggaacaccctgccctacacctttggacagggcaccaagctcgagattaaaggtggaggtggcagcggaggaggtgggtccggcggtggaggaagccaggtccaactccaagaaagcggaccgggtcttgtgaagccatcagaaactctttcactgacttgtactgtgagcggagtgtctctccccgattacggggtgtcttggatcagacagccaccggggaagggtctggaatggattggagtgatttggggctctgagactacttactactcttcatccctcaagtcacgcgtcaccatctcaaaggacaactctaagaatcaggtgtcactgaaactgtcatctgtgaccgcagccgacaccgccgtgtactattgcgctaagcattactattatggcgggagctacgcaatggattactggggacagggtactctggtcaccgtgtccagcaccactaccccagcaccgaggccacccaccccggctcctaccatcgcctcccagcctctgtccctgcgtccggaggcatgtagacccgcagctggtggggccgtgcatacccggggtcttgacttcgcctgcgatatctacatttgggcccctctggctggtacttgcggggtcctgctgctttcactcgtgatcactctttactgtaagcgcggtcggaagaagctgctgtacatctttaagcaacccttcatgaggcctgtgcagactactcaagaggaggacggctgttcatgccggttcccagaggaggaggaaggcggctgcgaactgcgcgtgaaattcagccgcagcgcagatgctccagcctaccagcaggggcagaaccagctctacaacgaactcaatcttggtcggagagaggagtacgacgtgctggacaagcggagaggacgggacccagaaatgggcgggaagccgcgcagaaagaatccccaagagggcctgtacaacgagctccaaaaggataagatggcagaagcctatagcgagattggtatgaaaggggaacgcagaagaggcaaaggccacgacggactgtaccagggactcagcaccgccaccaaggacacctatgacgctcttcacatgcaggccctgccgcctcgg

SEQ ID NO: 1099 - DNA, 2256 bp, Artificial Sequence
  source: /note="Description of Artificial Sequence: Synthetic polynucleotide"
atggccctccctgtcaccgccctgctgcttccgctggctcttctgctccacgccgctcggccccagtcgttggcactttccctgactgccgaccagatggtgtccgcccttctggacgccgagcctccaattctgtactcggagtacgatccgactcgcccgttctccgaagccagcatgatgggcctgttgactaacctggcggaccgcgagttggtgcacatgattaactgggctaagcgggtgccgggcttcgtggacctgaccctgcacgaccaagtgcacctcctggaatgcgcctggatggaaatcctcatgatcggcctcgtgtggagatccatggagcatcccggaaagctcctgtttgcacccaacctcctgcttgatcgcaaccagggaaaatgcgtggaagggggtgtcgagattttcgacatgctgctcgccacctcttcccggttccggatgatgaatctgcagggagaagagttcgtgtgtctgaagtcaatcatcctgctgaactccggggtctataccttcctgagctcgaccctcaagtcactggaggaaaaagaccacatccatcgcgtgctcgataagatcaccgacacccttatccatctcatggcgaaggctggactgaccctgcaacagcagcaccagaggctggcccagttgctgctgattctgagccacatccggcacatgtcgaacaagaggatggaacacctgtacagcatgaagtgcaagaacgtcgtgcctctgtccgatctgctcctggaaatgctggacgcgcacagactcggaaccggcgcggaagacccccggccctccaggaagcgaaggtccctcggagacgtgggtgaaattgtgatgacccagtcacccgccactcttagcctttcacccggtgagcgcgcaaccctgtcttgcagagcctcccaagacatctcaaaataccttaattggtatcaacagaagcccggacaggctcctcgccttctgatctaccacaccagccggctccattctggaatccctgccaggttcagcggtagcggatctgggaccgactacaccctcactatcagctcactgcagccagaggacttcgctgtctatttctgtcagcaagggaacaccctgccctacacctttggacagggcaccaagctcgagattaaaggtggaggtggcagcggaggaggtgggtccggcggtggaggaagccaggtccaactccaagaaagcggaccgggtcttgtgaagccatcagaaactctttcactgacttgtactgtgagcggagtgtctctccccgattacggggtgtcttggatcagacagccaccggggaagggtctggaatggattggagtgatttggggctctgagactacttactactcttcatccctcaagtcacgcgtcaccatctcaaaggacaactctaagaatcaggtgtcactgaaactgtcatctgtgaccgcagccgacaccgccgtgtactattgcgctaagcattactattatggcgggagctacgcaatggattactggggacagggtactctggtcaccgtgtccagcaccactaccccagcaccgaggccacccaccccggctcctaccatcgcctcccagcctctgtccctgcgtccggaggcatgtagacccgcagctggtggggccgtgcatacccggggtcttgacttcgcctgcgatatctacatttgggcccctctggctggtacttgcggggtcctgctgctttcactcgtgatcactctttactgtaagcgcggtcggaagaagctgctgtacatctttaagcaacccttcatgaggcctgtgcagactactcaagaggaggacggctgttcatgccggttcccagaggaggaggaaggcggctgcgaactgcgcgtgaaattcagccgcagcgcagatgctccagcctaccagcaggggcagaaccagctctacaacgaactcaatcttggtcggagagaggagtacgacgtgctggacaagcggagaggacgggacccagaaatgggcgggaagccgcgcagaaagaatccccaagagggcctgtacaacgagctccaaaaggataagatggcagaagcctatagcgagattggtatgaaaggggaacgcagaagaggcaaaggccacgacggactgtaccagggactcagcaccgccaccaaggacacctatgacgctcttcacatgcaggccctgccgcctcgg

SEQ ID NO: 1100 - DNA, 2238 bp, Artificial Sequence
  source: /note="Description of Artificial Sequence: Synthetic polynucleotide"
atggccctccctgtcaccgccctgctgcttccgctggctcttctgctccacgccgctcggccccagtcgttggcactttccctgactgccgaccagatggtgtccgcccttctggacgccgagcctccaattctgtactcggagtacgatccgactcgcccgttctccgaagccagcatgatgggcctgttgactaacctggcggaccgcgagttggtgcacatgattaactgggctaagcgggtgccgggcttcgtggacctggccctgcacgaccaagtgcacctcctggaatgcgcctggatggaaatcctcatgatcggcctcgtgtggagatccatggagcatcccggaaagctcctgtttgcacccaacctcctgcttgatcgcaaccagggaaaatgcgtggaagggggtgtcgagattttcgacatgctgctcgccacctcttcccggttccggatgatgaatctgcagggagaagagttcgtgtgtctgaagtcaatcatcctgctgaactccggggtctataccttcctgagctcgaccctcaagtcactggaggaaaaagaccacatccatcgcgtgctcgataagatcaccgacacccttatccatctcatggcgaaggctggactgaccctgcaacagcagcaccagaggctggcccagttgctgctgattctgagccacatccggcacatgtcgtccaagaggatggaacacctgtacagcatgaagtgcaagaacgtcgtgcctctgtccgatctgctcctggaaatgctggacgcgcacagactcgggacgggagctgaagatccacgacccagcagaaagcgacgggaaattgtgatgacccagtcacccgccactcttagcctttcacccggtgagcgcgcaaccctgtcttgcagagcctcccaagacatctcaaaataccttaattggtatcaacagaagcccggacaggctcctcgccttctgatctaccacaccagccggctccattctggaatccctgccaggttcagcggtagcggatctgggaccgactacaccctcactatcagctcactgcagccagaggacttcgctgtctatttctgtcagcaagggaacaccctgccctacacctttggacagggcaccaagctcgagattaaaggtggaggtggcagcggaggaggtgggtccggcggtggaggaagccaggtccaactccaagaaagcggaccgggtcttgtgaagccatcagaaactctttcactgacttgtactgtgagcggagtgtctctccccgattacggggtgtcttggatcagacagccaccggggaagggtctggaatggattggagtgatttggggctctgagactacttactactcttcatccctcaagtcacgcgtcaccatctcaaaggacaactctaagaatcaggtgtcactgaaactgtcatctgtgaccgcagccgacaccgccgtgtactattgcgctaagcattactattatggcgggagctacgcaatggattactggggacagggtactctggtcaccgtgtccagcaccactaccccagcaccgaggccacccaccccggctcctaccatcgcctcccagcctctgtccctgcgtccggaggcatgtagacccgcagctggtggggccgtgcatacccggggtcttgacttcgcctgcgatatctacatttgggcccctctggctggtacttgcggggtcctgctgctttcactcgtgatcactctttactgtaagcgcggtcggaagaagctgctgtacatctttaagcaacccttcatgaggcctgtgcagactactcaagaggaggacggctgttcatgccggttcccagaggaggaggaaggcggctgcgaactgcgcgtgaaattcagccgcagcgcagatgctccagcctaccagcaggggcagaaccagctctacaacgaactcaatcttggtcggagagaggagtacgacgtgctggacaagcggagaggacgggacccagaaatgggcgggaagccgcgcagaaagaatccccaagagggcctgtacaacgagctccaaaaggataagatggcagaagcctatagcgagattggtatgaaaggggaacgcagaagaggcaaaggccacgacggactgtaccagggactcagcaccgccaccaaggacacctatgacgctcttcacatgcaggccctgccgcctcgg

SEQ ID NO: 1101 - DNA, 2238 bp, Artificial Sequence
  source: /note="Description of Artificial Sequence: Synthetic polynucleotide"
atggccctccctgtcaccgccctgctgcttccgctggctcttctgctccacgccgctcggccccagtcgttggcactttccctgactgccgaccagatggtgtccgcccttctggacgccgagcctccaattctgtactcggagtacgatccgactcgcccgttctccgaagccagcatgatgggcctgttgactaacctggcggaccgcgagttggtgcacatgattaactgggctaagcgggtgccgggcttcgtggacctgaccctgcacgaccaagtgcacctcctggaatgcgcctggatggaaatcctcatgatcggcctcgtgtggagatccatggagcatcccggaaagctcctgtttgcacccaacctcctgcttgatcgcaaccagggaaaatgcgtggaagggggtgtcgagattttcgacatgctgctcgccacctcttcccggttccggatgatgaatctgcagggagaagagttcgtgtgtctgaagtcaatcatcctgctgaactccggggtctataccttcctgagctcgaccctcaagtcactggaggaaaaagaccacatccatcgcgtgctcgataagatcaccgacacccttatccatctcatggcgaaggctggactgaccctgcaacagcagcaccagaggctggcccagttgctgctgattctgagccacatccggcacatgtcgaacaagaggatggaacacctgtacagcatgaagtgcaagaacgtcgtgcctctgtccgatctgctcctggaaatgctggacgcgcacagactcgggacgggagctgaagatccacgacccagcagaaagcgacgggaaattgtgatgacccagtcacccgccactcttagcctttcacccggtgagcgcgcaaccctgtcttgcagagcctcccaagacatctcaaaataccttaattggtatcaacagaagcccggacaggctcctcgccttctgatctaccacaccagccggctccattctggaatccctgccaggttcagcggtagcggatctgggaccgactacaccctcactatcagctcactgcagccagaggacttcgctgtctatttctgtcagcaagggaacaccctgccctacacctttggacagggcaccaagctcgagattaaaggtggaggtggcagcggaggaggtgggtccggcggtggaggaagccaggtccaactccaagaaagcggaccgggtcttgtgaagccatcagaaactctttcactgacttgtactgtgagcggagtgtctctccccgattacggggtgtcttggatcagacagccaccggggaagggtctggaatggattggagtgatttggggctctgagactacttactactcttcatccctcaagtcacgcgtcaccatctcaaaggacaactctaagaatcaggtgtcactgaaactgtcatctgtgaccgcagccgacaccgccgtgtactattgcgctaagcattactattatggcgggagctacgcaatggattactggggacagggtactctggtcaccgtgtccagcaccactaccccagcaccgaggccacccaccccggctcctaccatcgcctcccagcctctgtccctgcgtccggaggcatgtagacccgcagctggtggggccgtgcatacccggggtcttgacttcgcctgcgatatctacatttgggcccctctggctggtacttgcggggtcctgctgctttcactcgtgatcactctttactgtaagcgcggtcggaagaagctgctgtacatctttaagcaacccttcatgaggcctgtgcagactactcaagaggaggacggctgttcatgccggttcccagaggaggaggaaggcggctgcgaactgcgcgtgaaattcagccgcagcgcagatgctccagcctaccagcaggggcagaaccagctctacaacgaactcaatcttggtcggagagaggagtacgacgtgctggacaagcggagaggacgggacccagaaatgggcgggaagccgcgcagaaagaatccccaagagggcctgtacaacgagctccaaaaggataagatggcagaagcctatagcgagattggtatgaaaggggaacgcagaagaggcaaaggccacgacggactgtaccagggactcagcaccgccaccaaggacacctatgacgctcttcacatgcaggccctgccgcctcgg

SEQ ID NO: 1102 - DNA, 2259 bp, Artificial Sequence
  source: /note="Description of Artificial Sequence: Synthetic polynucleotide"
atggccctccctgtcaccgccctgctgcttccgctggctcttctgctccacgccgctcggccccagtcgttggcactttccctgactgccgaccagatggtgtccgcccttctggacgccgagcctccaattctgtactcggagtacgatccgactcgcccgttctccgaagccagcatgatgggcctgttgactaacctggcggaccgcgagttggtgcacatgattaactgggctaagcgggtgccgggcttcgtggacctggccctgcacgaccaagtgcacctcctggaatgcgcctggatggaaatcctcatgatcggcctcgtgtggagatccatggagcatcccggaaagctcctgtttgcacccaacctcctgcttgatcgcaaccagggaaaatgcgtggaagggggtgtcgagattttcgacatgctgctcgccacctcttcccggttccggatgatgaatctgcagggagaagagttcgtgtgtctgaagtcaatcatcctgctgaactccggggtctataccttcctgagctcgaccctcaagtcactggaggaaaaagaccacatccatcgcgtgctcgataagatcaccgacacccttatccatctcatggcgaaggctggactgaccctgcaacagcagcaccagaggctggcccagttgctgctgattctgagccacatccggcacatgtcgtccaagaggatggaacacctgtacagcatgaagtgcaagaacgtcgtgcctctgtccgatctgctcctggaaatgctggacgcgcacagactcggaaccggcgcggaagacccccggccctccaggaagcgaaggtccctcggagacgtgggtcaagtgcaactcgtccaaagcggagcggaagtcaagaaacccggagcgagcgtgaaagtgtcctgcaaagcctccggctacacctttacgggctactacatgcactgggtgcgccaggcaccaggacagggtcttgaatggatgggatggatcaaccctaattcgggcggaactaactacgcacagaagttccaggggagagtgactctgactcgggatacctccatctcaactgtctacatggaactctcccgcttgcggtcagatgatacggcagtgtactactgcgcccgcgacatgaatatcctggctaccgtgccgttcgacatctggggacaggggactatggttactgtctcatcgggcggtggaggttcaggaggaggcggctcgggaggcggaggttcggacattcagatgacccagtccccatcctctctgtcggccagcgtcggagatagggtgaccattacctgtcgggcctcgcaaagcatctcctcgtacctcaactggtatcagcaaaagccgggaaaggcgcctaagctgctgatctacgccgcttcgagcttgcaaagcggggtgccatccagattctcgggatcaggctcaggaaccgacttcaccctgaccgtgaacagcctccagccggaggactttgccacttactactgccagcagggagactccgtgccgcttactttcggggggggtacccgcctggagatcaagaccactaccccagcaccgaggccacccaccccggctcctaccatcgcctcccagcctctgtccctgcgtccggaggcatgtagacccgcagctggtggggccgtgcatacccggggtcttgacttcgcctgcgatatctacatttgggcccctctggctggtacttgcggggtcctgctgctttcactcgtgatcactctttactgtaagcgcggtcggaagaagctgctgtacatctttaagcaacccttcatgaggcctgtgcagactactcaagaggaggacggctgttcatgccggttcccagaggaggaggaaggcggctgcgaactgcgcgtgaaattcagccgcagcgcagatgctccagcctaccagcaggggcagaaccagctctacaacgaactcaatcttggtcggagagaggagtacgacgtgctggacaagcggagaggacgggacccagaaatgggcgggaagccgcgcagaaagaatccccaagagggcctgtacaacgagctccaaaaggataagatggcagaagcctatagcgagattggtatgaaaggggaacgcagaagaggcaaaggccacgacggactgtaccagggactcagcaccgccaccaaggacacctatgacgctcttcacatgcaggccctgccgcctcgg

SEQ ID NO: 1103 - DNA, 2259 bp, Artificial Sequence
  source: /note="Description of Artificial Sequence: Synthetic polynucleotide"
atggccctccctgtcaccgccctgctgcttccgctggctcttctgctccacgccgctcggccccagtcgttggcactttccctgactgccgaccagatggtgtccgcccttctggacgccgagcctccaattctgtactcggagtacgatccgactcgcccgttctccgaagccagcatgatgggcctgttgactaacctggcggaccgcgagttggtgcacatgattaactgggctaagcgggtgccgggcttcgtggacctgaccctgcacgaccaagtgcacctcctggaatgcgcctggatggaaatcctcatgatcggcctcgtgtggagatccatggagcatcccggaaagctcctgtttgcacccaacctcctgcttgatcgcaaccagggaaaatgcgtggaagggggtgtcgagattttcgacatgctgctcgccacctcttcccggttccggatgatgaatctgcagggagaagagttcgtgtgtctgaagtcaatcatcctgctgaactccggggtctataccttcctgagctcgaccctcaagtcactggaggaaaaagaccacatccatcgcgtgctcgataagatcaccgacacccttatccatctcatggcgaaggctggactgaccctgcaacagcagcaccagaggctggcccagttgctgctgattctgagccacatccggcacatgtcgaacaagaggatggaacacctgtacagcatgaagtgcaagaacgtcgtgcctctgtccgatctgctcctggaaatgctggacgcgcacagactcggaaccggcgcggaagacccccggccctccaggaagcgaaggtccctcggagacgtgggtcaagtgcaactcgtccaaagcggagcggaagtcaagaaacccggagcgagcgtgaaagtgtcctgcaaagcctccggctacacctttacgggctactacatgcactgggtgcgccaggcaccaggacagggtcttgaatggatgggatggatcaaccctaattcgggcggaactaactacgcacagaagttccaggggagagtgactctgactcgggatacctccatctcaactgtctacatggaactctcccgcttgcggtcagatgatacggcagtgtactactgcgcccgcgacatgaatatcctggctaccgtgccgttcgacatctggggacaggggactatggttactgtctcatcgggcggtggaggttcaggaggaggcggctcgggaggcggaggttcggacattcagatgacccagtccccatcctctctgtcggccagcgtcggagatagggtgaccattacctgtcgggcctcgcaaagcatctcctcgtacctcaactggtatcagcaaaagccgggaaaggcgcctaagctgctgatctacgccgcttcgagcttgcaaagcggggtgccatccagattctcgggatcaggctcaggaaccgacttcaccctgaccgtgaacagcctccagccggaggactttgccacttactactgccagcagggagactccgtgccgcttactttcggggggggtacccgcctggagatcaagaccactaccccagcaccgaggccacccaccccggctcctaccatcgcctcccagcctctgtccctgcgtccggaggcatgtagacccgcagctggtggggccgtgcatacccggggtcttgacttcgcctgcgatatctacatttgggcccctctggctggtacttgcggggtcctgctgctttcactcgtgatcactctttactgtaagcgcggtcggaagaagctgctgtacatctttaagcaacccttcatgaggcctgtgcagactactcaagaggaggacggctgttcatgccggttcccagaggaggaggaaggcggctgcgaactgcgcgtgaaattcagccgcagcgcagatgctccagcctaccagcaggggcagaaccagctctacaacgaactcaatcttggtcggagagaggagtacgacgtgctggacaagcggagaggacgggacccagaaatgggcgggaagccgcgcagaaagaatccccaagagggcctgtacaacgagctccaaaaggataagatggcagaagcctatagcgagattggtatgaaaggggaacgcagaagaggcaaaggccacgacggactgtaccagggactcagcaccgccaccaaggacacctatgacgctcttcacatgcaggccctgccgcctcgg

SEQ ID NO: 1104 - DNA, 2241 bp, Artificial Sequence
  source: /note="Description of Artificial Sequence: Synthetic polynucleotide"
atggccctccctgtcaccgccctgctgcttccgctggctcttctgctccacgccgctcggccccagtcgttggcactttccctgactgccgaccagatggtgtccgcccttctggacgccgagcctccaattctgtactcggagtacgatccgactcgcccgttctccgaagccagcatgatgggcctgttgactaacctggcggaccgcgagttggtgcacatgattaactgggctaagcgggtgccgggcttcgtggacctggccctgcacgaccaagtgcacctcctggaatgcgcctggatggaaatcctcatgatcggcctcgtgtggagatccatggagcatcccggaaagctcctgtttgcacccaacctcctgcttgatcgcaaccagggaaaatgcgtggaagggggtgtcgagattttcgacatgctgctcgccacctcttcccggttccggatgatgaatctgcagggagaagagttcgtgtgtctgaagtcaatcatcctgctgaactccggggtctataccttcctgagctcgaccctcaagtcactggaggaaaaagaccacatccatcgcgtgctcgataagatcaccgacacccttatccatctcatggcgaaggctggactgaccctgcaacagcagcaccagaggctggcccagttgctgctgattctgagccacatccggcacatgtcgtccaagaggatggaacacctgtacagcatgaagtgcaagaacgtcgtgcctctgtccgatctgctcctggaaatgctggacgcgcacagactcggaaccggcgcggaagacccccggccctccaggaagcgaaggcaagtgcaactcgtccaaagcggagcggaagtcaagaaacccggagcgagcgtgaaagtgtcctgcaaagcctccggctacacctttacgggctactacatgcactgggtgcgccaggcaccaggacagggtcttgaatggatgggatggatcaaccctaattcgggcggaactaactacgcacagaagttccaggggagagtgactctgactcgggatacctccatctcaactgtctacatggaactctcccgcttgcggtcagatgatacggcagtgtactactgcgcccgcgacatgaatatcctggctaccgtgccgttcgacatctggggacaggggactatggttactgtctcatcgggcggtggaggttcaggaggaggcggctcgggaggcggaggttcggacattcagatgacccagtccccatcctctctgtcggccagcgtcggagatagggtgaccattacctgtcgggcctcgcaaagcatctcctcgtacctcaactggtatcagcaaaagccgggaaaggcgcctaagctgctgatctacgccgcttcgagcttgcaaagcggggtgccatccagattctcgggatcaggctcaggaaccgacttcaccctgaccgtgaacagcctccagccggaggactttgccacttactactgccagcagggagactccgtgccgcttactttcggggggggtacccgcctggagatcaagaccactaccccagcaccgaggccacccaccccggctcctaccatcgcctcccagcctctgtccctgcgtccggaggcatgtagacccgcagctggtggggccgtgcatacccggggtcttgacttcgcctgcgatatctacatttgggcccctctggctggtacttgcggggtcctgctgctttcactcgtgatcactctttactgtaagcgcggtcggaagaagctgctgtacatctttaagcaacccttcatgaggcctgtgcagactactcaagaggaggacggctgttcatgccggttcccagaggaggaggaaggcggctgcgaactgcgcgtgaaattcagccgcagcgcagatgctccagcctaccagcaggggcagaaccagctctacaacgaactcaatcttggtcggagagaggagtacgacgtgctggacaagcggagaggacgggacccagaaatgggcgggaagccgcgcagaaagaatccccaagagggcctgtacaacgagctccaaaaggataagatggcagaagcctatagcgagattggtatgaaaggggaacgcagaagaggcaaaggccacgacggactgtaccagggactcagcaccgccaccaaggacacctatgacgctcttcacatgcaggccctgccgcctcgg

SEQ ID NO: 1105 - DNA, 2241 bp, Artificial Sequence
  source: /note="Description of Artificial Sequence: Synthetic polynucleotide"
atggccctccctgtcaccgccctgctgcttccgctggctcttctgctccacgccgctcggccccagtcgttggcactttccctgactgccgaccagatggtgtccgcccttctggacgccgagcctccaattctgtactcggagtacgatccgactcgcccgttctccgaagccagcatgatgggcctgttgactaacctggcggaccgcgagttggtgcacatgattaactgggctaagcgggtgccgggcttcgtggacctgaccctgcacgaccaagtgcacctcctggaatgcgcctggatggaaatcctcatgatcggcctcgtgtggagatccatggagcatcccggaaagctcctgtttgcacccaacctcctgcttgatcgcaaccagggaaaatgcgtggaagggggtgtcgagattttcgacatgctgctcgccacctcttcccggttccggatgatgaatctgcagggagaagagttcgtgtgtctgaagtcaatcatcctgctgaactccggggtctataccttcctgagctcgaccctcaagtcactggaggaaaaagaccacatccatcgcgtgctcgataagatcaccgacacccttatccatctcatggcgaaggctggactgaccctgcaacagcagcaccagaggctggcccagttgctgctgattctgagccacatccggcacatgtcgaacaagaggatggaacacctgtacagcatgaagtgcaagaacgtcgtgcctctgtccgatctgctcctggaaatgctggacgcgcacagactcgggacgggagctgaagatccacgacccagcagaaagcgacggcaagtgcaactcgtccaaagcggagcggaagtcaagaaacccggagcgagcgtgaaagtgtcctgcaaagcctccggctacacctttacgggctactacatgcactgggtgcgccaggcaccaggacagggtcttgaatggatgggatggatcaaccctaattcgggcggaactaactacgcacagaagttccaggggagagtgactctgactcgggatacctccatctcaactgtctacatggaactctcccgcttgcggtcagatgatacggcagtgtactactgcgcccgcgacatgaatatcctggctaccgtgccgttcgacatctggggacaggggactatggttactgtctcatcgggcggtggaggttcaggaggaggcggctcgggaggcggaggttcggacattcagatgacccagtccccatcctctctgtcggccagcgtcggagatagggtgaccattacctgtcgggcctcgcaaagcatctcctcgtacctcaactggtatcagcaaaagccgggaaaggcgcctaagctgctgatctacgccgcttcgagcttgcaaagcggggtgccatccagattctcgggatcaggctcaggaaccgacttcaccctgaccgtgaacagcctccagccggaggactttgccacttactactgccagcagggagactccgtgccgcttactttcggggggggtacccgcctggagatcaagaccactaccccagcaccgaggccacccaccccggctcctaccatcgcctcccagcctctgtccctgcgtccggaggcatgtagacccgcagctggtggggccgtgcatacccggggtcttgacttcgcctgcgatatctacatttgggcccctctggctggtacttgcggggtcctgctgctttcactcgtgatcactctttactgtaagcgcggtcggaagaagctgctgtacatctttaagcaacccttcatgaggcctgtgcagactactcaagaggaggacggctgttcatgccggttcccagaggaggaggaaggcggctgcgaactgcgcgtgaaattcagccgcagcgcagatgctccagcctaccagcaggggcagaaccagctctacaacgaactcaatcttggtcggagagaggagtacgacgtgctggacaagcggagaggacgggacccagaaatgggcgggaagccgcgcagaaagaatccccaagagggcctgtacaacgagctccaaaaggataagatggcagaagcctatagcgagattggtatgaaaggggaacgcagaagaggcaaaggccacgacggactgtaccagggactcagcaccgccaccaaggacacctatgacgctcttcacatgcaggccctgccgcctcgg

SEQ ID NO: 1106 - DNA, 2247 bp, Artificial Sequence
  source: /note="Description of Artificial Sequence: Synthetic polynucleotide"
atggccctccctgtcaccgccctgctgcttccgctggctcttctgctccacgccgctcggccccagtcgttggcactttccctgactgccgaccagatggtgtccgcccttctggacgccgagcctccaattctgtactcggagtacgatccgactcgcccgttctccgaagccagcatgatgggcctgttgactaacctggcggaccgcgagttggtgcacatgattaactgggctaagcgggtgccgggcttcgtggacctggccctgcacgaccaagtgcacctcctggaatgcgcctggatggaaatcctcatgatcggcctcgtgtggagatccatggagcatcccggaaagctcctgtttgcacccaacctcctgcttgatcgcaaccagggaaaatgcgtggaagggggtgtcgagattttcgacatgctgctcgccacctcttcccggttccggatgatgaatctgcagggagaagagttcgtgtgtctgaagtcaatcatcctgctgaactccggggtctataccttcctgagctcgaccctcaagtcactggaggaaaaagaccacatccatcgcgtgctcgataagatcaccgacacccttatccatctcatggcgaaggctggactgaccctgcaacagcagcaccagaggctggcccagttgctgctgattctgagccacatccggcacatgtcgtccaagaggatggaacacctgtacagcatgaagtgcaagaacgtcgtgcctctgtccgatctgctcctggaaatgctggacgcgcacagactcggaaccggcgcggaagacccccggccctccaggaagcgaaggtccctcggagacgtgggtgaagtgcaattggtggaatcagggggaggacttgtgcagcctggaggatcgctgagactgtcatgtgccgtgtccggctttgccctgtccaaccacgggatgtcctgggtccgccgcgcgcctggaaagggcctcgaatgggtgtcgggtattgtgtacagcggtagcacctactatgccgcatccgtgaaggggagattcaccatcagccgggacaactccaggaacactctgtacctccaaatgaattcgctgaggccagaggacactgccatctactactgctccgcgcatggcggagagtccgacgtctggggacaggggaccaccgtgaccgtgtctagcgcgtccggcggaggcggcagcgggggtcgggcatcagggggcggcggatcggacatccagctcacccagtccccgagctcgctgtccgcctccgtgggagatcgggtcaccatcacgtgccgcgccagccagtcgatttcctcctacctgaactggtaccaacagaagcccggaaaagccccgaagcttctcatctacgccgcctcgagcctgcagtcaggagtgccctcacggttctccggctccggttccggtactgatttcaccctgaccatttcctccctgcaaccggaggacttcgctacttactactgccagcagtcgtactccaccccctacactttcggacaaggcaccaaggtcgaaatcaagaccactaccccagcaccgaggccacccaccccggctcctaccatcgcctcccagcctctgtccctgcgtccggaggcatgtagacccgcagctggtggggccgtgcatacccggggtcttgacttcgcctgcgatatctacatttgggcccctctggctggtacttgcggggtcctgctgctttcactcgtgatcactctttactgtaagcgcggtcggaagaagctgctgtacatctttaagcaacccttcatgaggcctgtgcagactactcaagaggaggacggctgttcatgccggttcccagaggaggaggaaggcggctgcgaactgcgcgtgaaattcagccgcagcgcagatgctccagcctaccagcaggggcagaaccagctctacaacgaactcaatcttggtcggagagaggagtacgacgtgctggacaagcggagaggacgggacccagaaatgggcgggaagccgcgcagaaagaatccccaagagggcctgtacaacgagctccaaaaggataagatggcagaagcctatagcgagattggtatgaaaggggaacgcagaagaggcaaaggccacgacggactgtaccagggactcagcaccgccaccaaggacacctatgacgctcttcacatgcaggccctgccgcctcgg

SEQ ID NO: 1107 - DNA, 2247 bp, Artificial Sequence
  source: /note="Description of Artificial Sequence: Synthetic polynucleotide"
atggccctccctgtcaccgccctgctgcttccgctggctcttctgctccacgccgctcggccccagtcgttggcactttccctgactgccgaccagatggtgtccgcccttctggacgccgagcctccaattctgtactcggagtacgatccgactcgcccgttctccgaagccagcatgatgggcctgttgactaacctggcggaccgcgagttggtgcacatgattaactgggctaagcgggtgccgggcttcgtggacctgaccctgcacgaccaagtgcacctcctggaatgcgcctggatggaaatcctcatgatcggcctcgtgtggagatccatggagcatcccggaaagctcctgtttgcacccaacctcctgcttgatcgcaaccagggaaaatgcgtggaagggggtgtcgagattttcgacatgctgctcgccacctcttcccggttccggatgatgaatctgcagggagaagagttcgtgtgtctgaagtcaatcatcctgctgaactccggggtctataccttcctgagctcgaccctcaagtcactggaggaaaaagaccacatccatcgcgtgctcgataagatcaccgacacccttatccatctcatggcgaaggctggactgaccctgcaacagcagcaccagaggctggcccagttgctgctgattctgagccacatccggcacatgtcgaacaagaggatggaacacctgtacagcatgaagtgcaagaacgtcgtgcctctgtccgatctgctcctggaaatgctggacgcgcacagactcggaaccggcgcggaagacccccggccctccaggaagcgaaggtccctcggagacgtgggtgaagtgcaattggtggaatcagggggaggacttgtgcagcctggaggatcgctgagactgtcatgtgccgtgtccggctttgccctgtccaaccacgggatgtcctgggtccgccgcgcgcctggaaagggcctcgaatgggtgtcgggtattgtgtacagcggtagcacctactatgccgcatccgtgaaggggagattcaccatcagccgggacaactccaggaacactctgtacctccaaatgaattcgctgaggccagaggacactgccatctactactgctccgcgcatggcggagagtccgacgtctggggacaggggaccaccgtgaccgtgtctagcgcgtccggcggaggcggcagcgggggtcgggcatcagggggcggcggatcggacatccagctcacccagtccccgagctcgctgtccgcctccgtgggagatcgggtcaccatcacgtgccgcgccagccagtcgatttcctcctacctgaactggtaccaacagaagcccggaaaagccccgaagcttctcatctacgccgcctcgagcctgcagtcaggagtgccctcacggttctccggctccggttccggtactgatttcaccctgaccatttcctccctgcaaccggaggacttcgctacttactactgccagcagtcgtactccaccccctacactttcggacaaggcaccaaggtcgaaatcaagaccactaccccagcaccgaggccacccaccccggctcctaccatcgcctcccagcctctgtccctgcgtccggaggcatgtagacccgcagctggtggggccgtgcatacccggggtcttgacttcgcctgcgatatctacatttgggcccctctggctggtacttgcggggtcctgctgctttcactcgtgatcactctttactgtaagcgcggtcggaagaagctgctgtacatctttaagcaacccttcatgaggcctgtgcagactactcaagaggaggacggctgttcatgccggttcccagaggaggaggaaggcggctgcgaactgcgcgtgaaattcagccgcagcgcagatgctccagcctaccagcaggggcagaaccagctctacaacgaactcaatcttggtcggagagaggagtacgacgtgctggacaagcggagaggacgggacccagaaatgggcgggaagccgcgcagaaagaatccccaagagggcctgtacaacgagctccaaaaggataagatggcagaagcctatagcgagattggtatgaaaggggaacgcagaagaggcaaaggccacgacggactgtaccagggactcagcaccgccaccaaggacacctatgacgctcttcacatgcaggccctgccgcctcgg

SEQ ID NO: 1108 - DNA, 2229 bp, Artificial Sequence
  source: /note="Description of Artificial Sequence: Synthetic polynucleotide"
atggccctccctgtcaccgccctgctgcttccgctggctcttctgctccacgccgctcggccccagtcgttggcactttccctgactgccgaccagatggtgtccgcccttctggacgccgagcctccaattctgtactcggagtacgatccgactcgcccgttctccgaagccagcatgatgggcctgttgactaacctggcggaccgcgagttggtgcacatgattaactgggctaagcgggtgccgggcttcgtggacctggccctgcacgaccaagtgcacctcctggaatgcgcctggatggaaatcctcatgatcggcctcgtgtggagatccatggagcatcccggaaagctcctgtttgcacccaacctcctgcttgatcgcaaccagggaaaatgcgtggaagggggtgtcgagattttcgacatgctgctcgccacctcttcccggttccggatgatgaatctgcagggagaagagttcgtgtgtctgaagtcaatcatcctgctgaactccggggtctataccttcctgagctcgaccctcaagtcactggaggaaaaagaccacatccatcgcgtgctcgataagatcaccgacacccttatccatctcatggcgaaggctggactgaccctgcaacagcagcaccagaggctggcccagttgctgctgattctgagccacatccggcacatgtcgtccaagaggatggaacacctgtacagcatgaagtgcaagaacgtcgtgcctctgtccgatctgctcctggaaatgctggacgcgcacagactcgggacgggagctgaagatccacgacccagcagaaagcgacgggaagtgcaattggtggaatcagggggaggacttgtgcagcctggaggatcgctgagactgtcatgtgccgtgtccggctttgccctgtccaaccacgggatgtcctgggtccgccgcgcgcctggaaagggcctcgaatgggtgtcgggtattgtgtacagcggtagcacctactatgccgcatccgtgaaggggagattcaccatcagccgggacaactccaggaacactctgtacctccaaatgaattcgctgaggccagaggacactgccatctactactgctccgcgcatggcggagagtccgacgtctggggacaggggaccaccgtgaccgtgtctagcgcgtccggcggaggcggcagcgggggtcgggcatcagggggcggcggatcggacatccagctcacccagtccccgagctcgctgtccgcctccgtgggagatcgggtcaccatcacgtgccgcgccagccagtcgatttcctcctacctgaactggtaccaacagaagcccggaaaagccccgaagcttctcatctacgccgcctcgagcctgcagtcaggagtgccctcacggttctccggctccggttccggtactgatttcaccctgaccatttcctccctgcaaccggaggacttcgctacttactactgccagcagtcgtactccaccccctacactttcggacaaggcaccaaggtcgaaatcaagaccactaccccagcaccgaggccacccaccccggctcctaccatcgcctcccagcctctgtccctgcgtccggaggcatgtagacccgcagctggtggggccgtgcatacccggggtcttgacttcgcctgcgatatctacatttgggcccctctggctggtacttgcggggtcctgctgctttcactcgtgatcactctttactgtaagcgcggtcggaagaagctgctgtacatctttaagcaacccttcatgaggcctgtgcagactactcaagaggaggacggctgttcatgccggttcccagaggaggaggaaggcggctgcgaactgcgcgtgaaattcagccgcagcgcagatgctccagcctaccagcaggggcagaaccagctctacaacgaactcaatcttggtcggagagaggagtacgacgtgctggacaagcggagaggacgggacccagaaatgggcgggaagccgcgcagaaagaatccccaagagggcctgtacaacgagctccaaaaggataagatggcagaagcctatagcgagattggtatgaaaggggaacgcagaagaggcaaaggccacgacggactgtaccagggactcagcaccgccaccaaggacacctatgacgctcttcacatgcaggccctgccgcctcgg

SEQ ID NO: 1109 - DNA, 2229 bp, Artificial Sequence
  source: /note="Description of Artificial Sequence: Synthetic polynucleotide"
atggccctccctgtcaccgccctgctgcttccgctggctcttctgctccacgccgctcggccccagtcgttggcactttccctgactgccgaccagatggtgtccgcccttctggacgccgagcctccaattctgtactcggagtacgatccgactcgcccgttctccgaagccagcatgatgggcctgttgactaacctggcggaccgcgagttggtgcacatgattaactgggctaagcgggtgccgggcttcgtggacctgaccctgcacgaccaagtgcacctcctggaatgcgcctggatggaaatcctcatgatcggcctcgtgtggagatccatggagcatcccggaaagctcctgtttgcacccaacctcctgcttgatcgcaaccagggaaaatgcgtggaagggggtgtcgagattttcgacatgctgctcgccacctcttcccggttccggatgatgaatctgcagggagaagagttcgtgtgtctgaagtcaatcatcctgctgaactccggggtctataccttcctgagctcgaccctcaagtcactggaggaaaaagaccacatccatcgcgtgctcgataagatcaccgacacccttatccatctcatggcgaaggctggactgaccctgcaacagcagcaccagaggctggcccagttgctgctgattctgagccacatccggcacatgtcgaacaagaggatggaacacctgtacagcatgaagtgcaagaacgtcgtgcctctgtccgatctgctcctggaaatgctggacgcgcacagactcgggacgggagctgaagatccacgacccagcagaaagcgacgggaagtgcaattggtggaatcagggggaggacttgtgcagcctggaggatcgctgagactgtcatgtgccgtgtccggctttgccctgtccaaccacgggatgtcctgggtccgccgcgcgcctggaaagggcctcgaatgggtgtcgggtattgtgtacagcggtagcacctactatgccgcatccgtgaaggggagattcaccatcagccgggacaactccaggaacactctgtacctccaaatgaattcgctgaggccagaggacactgccatctactactgctccgcgcatggcggagagtccgacgtctggggacaggggaccaccgtgaccgtgtctagcgcgtccggcggaggcggcagcgggggtcgggcatcagggggcggcggatcggacatccagctcacccagtccccgagctcgctgtccgcctccgtgggagatcgggtcaccatcacgtgccgcgccagccagtcgatttcctcctacctgaactggtaccaacagaagcccggaaaagccccgaagcttctcatctacgccgcctcgagcctgcagtcaggagtgccctcacggttctccggctccggttccggtactgatttcaccctgaccatttcctccctgcaaccggaggacttcgctacttactactgccagcagtcgtactccaccccctacactttcggacaaggcaccaaggtcgaaatcaagaccactaccccagcaccgaggccacccaccccggctcctaccatcgcctcccagcctctgtccctgcgtccggaggcatgtagacccgcagctggtggggccgtgcatacccggggtcttgacttcgcctgcgatatctacatttgggcccctctggctggtacttgcggggtcctgctgctttcactcgtgatcactctttactgtaagcgcggtcggaagaagctgctgtacatctttaagcaacccttcatgaggcctgtgcagactactcaagaggaggacggctgttcatgccggttcccagaggaggaggaaggcggctgcgaactgcgcgtgaaattcagccgcagcgcagatgctccagcctaccagcaggggcagaaccagctctacaacgaactcaatcttggtcggagagaggagtacgacgtgctggacaagcggagaggacgggacccagaaatgggcgggaagccgcgcagaaagaatccccaagagggcctgtacaacgagctccaaaaggataagatggcagaagcctatagcgagattggtatgaaaggggaacgcagaagaggcaaaggccacgacggactgtaccagggactcagcaccgccaccaaggacacctatgacgctcttcacatgcaggccctgccgcctcgg

SEQ ID NO: 1110 - DNA, 735 bp, Artificial Sequence
  source: /note="Description of Artificial Sequence: Synthetic polynucleotide"
tcgttggcactttccctgactgccgaccagatggtgtccgcccttctggacgccgagcctccaattctgtactcggagtacgatccgactcgcccgttctccgaagccagcatgatgggcctgttgactaacctggcggaccgcgagttggtgcacatgattaactgggctaagcgggtgccgggcttcgtggacctggccctgcacgaccaagtgcacctcctggaatgcgcctggatggaaatcctcatgatcggcctcgtgtggagatccatggagcatcccggaaagctcctgtttgcacccaacctcctgcttgatcgcaaccagggaaaatgcgtggaagggggtgtcgagattttcgacatgctgctcgccacctcttcccggttccggatgatgaatctgcagggagaagagttcgtgtgtctgaagtcaatcatcctgctgaactccggggtctataccttcctgagctcgaccctcaagtcactggaggaaaaagaccacatccatcgcgtgctcgataagatcaccgacacccttatccatctcatggcgaaggctggactgaccctgcaacagcagcaccagaggctggcccagttgctgctgattctgagccacatccggcacatgtcgtccaagaggatggaacacctgtacagcatgaagtgcaagaacgtcgtgcctctgtccgatctgctcctggaaatgctggacgcgcacagactc

SEQ ID NO: 1111 - DNA, 105 bp, Artificial Sequence
  source: /note="Description of Artificial Sequence: Synthetic polynucleotide"
acaaaaaagaagtattcatccagtgtgcacgaccctaacggtgaatacatgttcatgagagcagtgaacacagccaaaaaatccagactcacagatgtgacccta

SEQ ID NO: 1112 - DNA, 12 bp, Artificial Sequence
  source: /note="Description of Artificial Sequence: Synthetic oligonucleotide"
cgtactaaaaga

SEQ ID NO: 1113 - DNA, 123 bp, Artificial Sequence; identical to SEQ ID NO: 17
  source: /note="Description of Artificial Sequence: Synthetic polynucleotide"

SEQ ID NO: 1114 - protein, 21 aa, Artificial Sequence
  source: /note="Description of Artificial Sequence: Synthetic peptide"
MGLLQLLAFSFLALCRARVRA

SEQ ID NO: 1115 - protein, 21 aa, Artificial Sequence
  source: /note="Description of Artificial Sequence: Synthetic peptide"
MLLAWVQAFLVSNMLLAEAYG

SEQ ID NO: 1116 - protein, 21 aa, Artificial Sequence
  source: /note="Description of Artificial Sequence: Synthetic peptide"
MKFQGPLACLLLALCLGSGEA

SEQ ID NO: 1117 - protein, 22 aa, Artificial Sequence
  source: /note="Description of Artificial Sequence: Synthetic peptide"
MDAMKRGLCCVLLLCGAVFVSP

SEQ ID NO: 1118 - protein, 35 aa, Artificial Sequence
  source: /note="Description of Artificial Sequence: Synthetic polypeptide"
MGTVSSRRSWWPLPLLLLLLLLLGPAGARAQEDED

SEQ ID NO: 1119 - protein, 247 aa, Artificial Sequence
  source: /note="Description of Artificial Sequence: Synthetic polypeptide"
RSSLALSLTADQMVSALLDAEPPILYSEYDPTRPFSEASMMGLLTNLADRELVHMINWAKRVPGFVDLALHDQVHLLECAWMEILMIGLVWRSMEHPGKLLFAPNLLLDRNQGKCVEGGVEIFDMLLATSSRFRMMNLQGEEFVCLKSIILLNSGVYTFLSSTLKSLEEKDHIHRVLDKITDTLIHLMAKAGLTLQQQHQRLAQLLLILSHIRHMSSKRMEHLYSMKCKNVVPLSDLLLEMLDAHRL

SEQ ID NO: 1120-3000 - skipped (1881 entries)

SEQ ID NO: 3001 - DNA, 1200 bp, Artificial Sequence
  source: /note="Description of Artificial Sequence: Synthetic polynucleotide"
atgctcgagggggttcaggtggagactatcagcccgggcgacggacggacattcccaaagcgcgggcagacgtgtgtggtgcattacaccgggatgcttgaggacggaaagaaagtggactcttcccgagaccgaaataaaccattcaagttcatgttgggcaagcaggaggttatcagagggtgggaggagggcgtcgctcagatgagtgtcggacagagggccaagctcacgatctcccctgattacgcctacggggcaactggtcaccccggaatcatcccccctcacgcaaccctcgtgttcgacgtcgagctgctcaaactggaatcaggcggaggcagtggcgctagcgggtttggcgatgtcggtgcccttgaaagcttgagaggaaatgccgatctcgcttacatcttgagcatggagccctgtgggcactgtctgatcatcaacaatgttaacttttgccgggagtccggcctgcgcacacgcacaggctccaacattgactgcgaaaaacttcgaaggaggtttagctctctgcatttcatggtagaggtgaagggggatctgaccgccaagaaaatggttctcgcccttctcgagcttgcgcagcaggaccatggagcgcttgactgttgtgtcgttgtgatactgagccatggctgtcaggcttcccatctccagtttccaggggccgtgtacggaaccgatggatgccctgtgtcagttgaaaagatcgtaaacatctttaacggaacatcttgcccgagcctcggcggtaaaccgaagcttttttttatccaggcctgcggcggtgaacagaaagatcatggcttcgaggttgccagtaccagccctgaagacgaatcccccgggtcaaatcctgaaccagatgcgacccctttccaggaaggactccgcacttttgaccagcttgacgccatttcctccctgccaacaccttccgacatatttgtaagctactccacctttccaggattcgtgagctggcgcgacccaaaatccggcagttggtatgttgaaaccctggacgatattttcgaacaatgggcccacagtgaggacctgcagtcccttcttctgcgcgtagccaatgccgtgtcagtcaaagggatttacaagcagatgccaggctgctttaatttcctgcgcaagaaactgttttttaagaccagt

SEQ ID NO: 3002 - DNA, 1172 bp, Artificial Sequence
  source: /note="Description of Artificial Sequence: Synthetic polynucleotide"
cggacggacattcccaaagcgcgggcagacgtgtgtggtgcattacaccgggatgcttgaggacggaaagaaagtggactcttcccgagaccgaaataaaccattcaagttcatgttgggcaagcaggaggttatcagagggtgggaggagggcgtcgctcagatgagtgtcggacagagggccaagctcacgatctcccctgattacgcctacggggcaactggtcaccccggaatcatcccccctcacgcaaccctcgtgttcgacgtcgagctgctcaaactggaatcaggcggaggcagtggcgggtttggcgatgtcggtgcccttgaaagcttgagaggaaatgccgatctcgcttacatcttgagcatggagccctgtgggcactgtctgatcatcaacaatgttaacttttgccgggagtccggcctgcgcacacgcacaggctccaacattgactgcgaaaaacttcgaaggaggtttagctctctgcatttcatggtagaggtgaagggggatctgaccgccaagaaaatggttctcgcccttctcgagcttgcgcagcaggaccatggagcgcttgactgttgtgtcgttgtgatactgagccatggctgtcaggcttcccatctccagtttccaggggccgtgtacggaaccgatggatgccctgtgtcagttgaaaagatcgtaaacatctttaacggaacatcttgcccgagcctcggcggtaaaccgaagcttttttttatccaggcctgcggcggtgaacagaaagatcatggcttcgaggttgccagtaccagccctgaagacgaatcccccgggtcaaatcctgaaccagatgcgacccctttccaggaaggactccgcacttttgaccagcttgacgccatttcctccctgccaacaccttccgacatatttgtaagctactccacctttccaggattcgtgagctggcgcgacccaaaatccggcagttggtatgttgaaaccctggacgatatcttcgaacaatgggcccacagtgaggacctgcagtcccttcttctgcgcgtagccaatgccgtgtcagtcaaagggatttacaagcagatgccaggctgctttaatttcctgcgcaagaaactgttttttaagaccagttgagtcgacggaggaggag

SEQ ID NO: 3003 - DNA, 1188 bp, Artificial Sequence
  source: /note="Description of Artificial Sequence: Synthetic polynucleotide"
ggggttcaggtggagactatcagcccgggcgacggacggacattcccaaagcgcgggcagacgtgtgtggtgcattacaccgggatgcttgaggacggaaagaaagtggactcttcccgagaccgaaataaaccattcaagttcatgttgggcaagcaggaggttatcagagggtgggaggagggcgtcgctcagatgagtgtcggacagagggccaagctcacgatctcccctgattacgcctacggggcaactggtcaccccggaatcatcccccctcacgcaaccctcgtgttcgacgtcgagctgctcaaactggaatcaggcggaggcagtggcgggtttggcgatgtcggtgcccttgaaagcttgagaggaaatgccgatctcgcttacatcttgagcatggagccctgtgggcactgtctgatcatcaacaatgttaacttttgccgggagtccggcctgcgcacacgcacaggctccaacattgactgcgaaaaacttcgaaggaggtttagctctctgcatttcatggtagaggtgaagggggatctgaccgccaagaaaatggttctcgcccttctcgagcttgcgcagcaggaccatggagcgcttgactgttgtgtcgttgtgatactgagccatggctgtcaggcttcccatctccagtttccaggggccgtgtacggaaccgatggatgccctgtgtcagttgaaaagatcgtaaacatctttaacggaacatcttgcccgagcctcggcggtaaaccgaagcttttttttatccaggcctgcggcggtgaacagaaagatcatggcttcgaggttgccagtaccagccctgaagacgaatcccccgggtcaaatcctgaaccagatgcgacccctttccaggaaggactccgcacttttgaccagcttgacgccatttcctccctgccaacaccttccgacatatttgtaagctactccacctttccaggattcgtgagctggcgcgacccaaaatccggcagttggtatgttgaaaccctggacgatatcttcgaacaatgggcccacagtgaggacctgcagtcccttcttctgcgcgtagccaatgccgtgtcagtcaaagggatttacaagcagatgccaggctgctttaatttcctgcgcaagaaactgttttttaagaccagttga

SEQ ID NO: 3004 - DNA, 1518 bp, Artificial Sequence
  source: /note="Description of Artificial Sequence: Synthetic polynucleotide"
agaggcgtgcaggtggaaaccatctctcccggcgacggcagaaccttccctaagaggggccagacctgcgtggtgcactacaccggcatgctggaagatggcaagaagatggacagctcccgggaccggaacaagcccttcaagttcatgctgggcaagcaggaagtgatccggggctgggaagagggcgtggcacagatgtctgtgggccagagagccaagctgaccatcagccccgattacgcctacggcgccacaggccaccctggcatcattcctccacacgccacactggtgttcgatgtggaactgctgaagctggaaacccggggagtgcaggtggaaacaatcagccctggcgacggccggacctttccaaaacggggacagacatgtgtggtgcattatacagggatgctggaagatgggaaaaaaatggatagcagccgcgaccgcaacaaaccttttaagtttatgctggggaaacaggaagtgattagaggctgggaagagggggtggcacagatgagcgtgggacagcgggccaaactgacaatctcccccgactatgcctatggggccaccggacaccccggaatcatcccacctcatgctaccctggtgtttgacgtggaactgctgaaactggaaacaagcggcggaggcagcggcggctttggagatgtgggagccctggaaagcctgcggggcaatgccgatctggcctacatcctgagcatggaaccctgcggccactgcctgattatcaacaacgtgaacttctgcagagagagcggcctgcggaccagaaccggcagcaacatcgactgcgagaagctgcggcggagattcagcagcctgcacttcatggtggaagtgaagggggacctgaccgccaagaaaatggtgctggctctgctggaactggcccagcaggatcatggcgccctggactgttgcgtggtcgtgatcctgagccacggctgccaggccagccatctgcagtttcccggcgctgtgtatggcaccgatggctgccctgtgtccgtggaaaagatcgtgaatatcttcaacggcaccagctgccccagcctgggcggaaagcctaagctgttctttattcaagcctgtgggggcgagcagaaggaccacggatttgaggtggccagcacctcccccgaggatgagagccctggcagcaaccctgagcctgacgccaccccattccaggaaggactgcggaccttcgaccagctggacgccatctctagcctgcccacccccagcgacatcttcgtgtcctacagcaccttccctggctttgtgtcctggcgggaccccaagtccggctcttggtacgtggaaaccctggacgacatctttgagcagtgggcccatagcgaggacctgcagagcctgctgctgagggtggccaatgccgtgtccgtgaagggcatctacaagcagatgcccggctgcttcaacttcctgcggaagaagctgtttttcaagaccagc

SEQ ID NO: 3005 - protein, 400 aa, Artificial Sequence
  source: /note="Description of Artificial Sequence: Synthetic polypeptide"
MLEGVQVETISPGDGRTFPKRGQTCVVHYTGMLEDGKKVDSSRDRNKPFKFMLGKQEVIRGWEEGVAQMSVGQRAKLTISPDYAYGATGHPGIIPPHATLVFDVELLKLESGGGSGASGFGDVGALESLRGNADLAYILSMEPCGHCLIINNVNFCRESGLRTRTGSNIDCEKLRRRFSSLHFMVEVKGDLTAKKMVLALLELAQQDHGALDCCVVVILSHGCQASHLQFPGAVYGTDGCPVSVEKIVNIFNGTSCPSLGGKPKLFFIQACGGEQKDHGFEVASTSPEDESPGSNPEPDATPFQEGLRTFDQLDAISSLPTPSDIFVSYSTFPGFVSWRDPKSGSWYVETLDDIFEQWAHSEDLQSLLLRVANAVSVKGIYKQMPGCFNFLRKKLFFKTS

SEQ ID NO: 3006 - protein, 395 aa, Artificial Sequence
  source: /note="Description of Artificial Sequence: Synthetic polypeptide"
GVQVETISPGDGRTFPKRGQTCVVHYTGMLEDGKKVDSSRDRNKPFKFMLGKQEVIRGWEEGVAQMSVGQRAKLTISPDYAYGATGHPGIIPPHATLVFDVELLKLESGGGSGGFGDVGALESLRGNADLAYILSMEPCGHCLIINNVNFCRESGLRTRTGSNIDCEKLRRRFSSLHFMVEVKGDLTAKKMVLALLELAQQDHGALDCCVVVILSHGCQASHLQFPGAVYGTDGCPVSVEKIVNIFNGTSCPSLGGKPKLFFIQACGGEQKDHGFEVASTSPEDESPGSNPEPDATPFQEGLRTFDQLDAISSLPTPSDIFVSYSTFPGFVSWRDPKSGSWYVETLDDIFEQWAHSEDLQSLLLRVANAVSVKGIYKQMPGCFNFLRKKLFFKTS

SEQ ID NO: 3007 - protein, 506 aa, Artificial Sequence
  source: /note="Description of Artificial Sequence: Synthetic polypeptide"
RGVQVETISPGDGRTFPKRGQTCVVHYTGMLEDGKKMDSSRDRNKPFKFMLGKQEVIRGWEEGVAQMSVGQRAKLTISPDYAYGATGHPGIIPPHATLVFDVELLKLETRGVQVETISPGDGRTFPKRGQTCVVHYTGMLEDGKKMDSSRDRNKPFKFMLGKQEVIRGWEEGVAQMSVGQRAKLTISPDYAYGATGHPGIIPPHATLVFDVELLKLETSGGGSGGFGDVGALESLRGNADLAYILSMEPCGHCLIINNVNFCRESGLRTRTGSNIDCEKLRRRFSSLHFMVEVKGDLTAKKMVLALLELAQQDHGALDCCVVVILSHGCQASHLQFPGAVYGTDGCPVSVEKIVNIFNGTSCPSLGGKPKLFFIQACGGEQKDHGFEVASTSPEDESPGSNPEPDATPFQEGLRTFDQLDAISSLPTPSDIFVSYSTFPGFVSWRDPKSGSWYVETLDDIFEQWAHSEDLQSLLLRVANAVSVKGIYKQMPGCFNFLRKKLFFKTS

SEQ ID NO: 3008 - DNA, 66 bp, Artificial Sequence
  source: /note="Description of Artificial Sequence: Synthetic oligonucleotide"
ggaagcggcgccaccaatttcagcctgctgaaacaggccggcgacgtggaagagaaccctggccct

SEQ ID NO: 3009 - DNA, 69 bp, Artificial Sequence
  source: /note="Description of Artificial Sequence: Synthetic oligonucleotide"
agtggctccggcgcaacaaatttctccttgctgaaacaggcaggcgacgttgaggaaaatcccggccca

SEQ ID NO: 3010 - DNA, 66 bp, Artificial Sequence
  source: /note="Description of Artificial Sequence: Synthetic oligonucleotide"
ggctccggcgcaacaaatttctccttgctgaaacaggcaggcgacgttgaggaaaatcccggccca

SEQ ID NO: 3011 - DNA, 32 bp, Artificial Sequence
  source: /note="Description of Artificial Sequence: Synthetic oligonucleotide"
ggggttcaggtggagactatcagcccgggcga

SEQ ID NO: 3012 - DNA, 66 bp, Artificial Sequence; identical to SEQ ID NO: 3010
  source: /note="Description of Artificial Sequence: Synthetic oligonucleotide"

SEQ ID NO: 3013 - protein, 22 aa, Artificial Sequence
  source: /note="Description of Artificial Sequence: Synthetic peptide"
GSGATNFSLLKQAGDVEENPGP

SEQ ID NO: 3014 - protein, 26 aa, Artificial Sequence
  source: /note="Description of Artificial Sequence: Synthetic peptide"
RKRRGSGATNFSLLKQAGDVEENPGP

SEQ ID NO: 3015 - DNA, 1308 bp, Artificial Sequence
  source: /note="Description of Artificial Sequence: Synthetic polynucleotide"
cggggcgtgcaggttgagacaatttccccaggagatgggcgaacgttccccaagcgcggacagacatgcgttgtgcactacacaggaatgttggaggacggaaagaaaatggacagttcaagagatcggaacaaaccattcaaattcatgttgggaaaacaggaagtgatacggggctgggaagagggtgtagcgcaaatgtccgttggtcaacgagcaaaactcacgataagtcccgattatgcttacggcgcaaccggtcacccgggcatcataccgcctcatgcgactttggtctttgatgtggagctgttgaaacttgaaactcgcggagtacaggttgaaacaatatcacccggggacgggcggacttttccgaagagaggtcagacctgcgtcgtccattataccggtatgctggaggacggaaagaaaatggacagctcacgggaccgaaataaaccattcaaatttatgttggggaaacaagaggttatcaggggctgggaggagggtgtggcccagatgtctgtcggtcagcgcgcgaaactcacaatctctccggattatgcgtatggggcgacagggcatccgggaattatccctccccacgctaccttggttttcgatgttgagcttctgaagttggagaccagaggagttcaagtggagacaatatctcctggggatggacggacgttccccaagcgcggccagacctgtgtagtccactacacagggatgcttgaagacggaaaaaagatggatagcagtagagatcgcaacaaaccatttaagttcatgctggggaagcaggaagtaatacgcggctgggaggaaggcgtggcacagatgagtgttggtcaacgggccaaacttactatttctcccgattatgcgtatggagccaccgggcaccctggcattatcccaccccatgccacattggtttttgacgttgaattgcttaaattggagaccaggggagtccaagtggaaacaatatcaccgggggatggtcggacttttcctaaaaggggccaaacctgtgtagtccattataccggaatgctcgaagacggaaagaaaatggactcttctagagaccgcaataagcccttcaagttcatgttgggtaagcaagaggtgatccggggctgggaagagggggtcgctcaaatgtccgtcggtcagcgagctaaactgactatttccccagactacgcatatggagcgactggccaccccggtattattcctccccatgcgactctcgtgttcgacgtagaactcttgaaattggaaacg

SEQ ID NO: 3016 - DNA, 24 bp, Artificial Sequence
  source: /note="Description of Artificial Sequence: Synthetic oligonucleotide"
tcagcccggaacaggcggaagaga

SEQ ID NO: 3017 - protein, 8 aa, Artificial Sequence
  source: /note="Description of Artificial Sequence: Synthetic peptide"
SARNRRKR

SEQ ID NO: 3018 - DNA, 2727 bp, Artificial Sequence
  source: /note="Description of Artificial Sequence: Synthetic polynucleotide"
atgctcgagggggttcaggtggagactatcagcccgggcgacggacggacattcccaaagcgcgggcagacgtgtgtggtgcattacaccgggatgcttgaggacggaaagaaagtggactcttcccgagaccgaaataaaccattcaagttcatgttgggcaagcaggaggttatcagagggtgggaggagggcgtcgctcagatgagtgtcggacagagggccaagctcacgatctcccctgattacgcctacggggcaactggtcaccccggaatcatcccccctcacgcaaccctcgtgttcgacgtcgagctgctcaaactggaatcaggcggaggcagtggcgctagcgggtttggcgatgtcggtgcccttgaaagcttgagaggaaatgccgatctcgcttacatcttgagcatggagccctgtgggcactgtctgatcatcaacaatgttaacttttgccgggagtccggcctgcgcacacgcacaggctccaacattgactgcgaaaaacttcgaaggaggtttagctctctgcatttcatggtagaggtgaagggggatctgaccgccaagaaaatggttctcgcccttctcgagcttgcgcagcaggaccatggagcgcttgactgttgtgtcgttgtgatactgagccatggctgtcaggcttcccatctccagtttccaggggccgtgtacggaaccgatggatgccctgtgtcagttgaaaagatcgtaaacatctttaacggaacatcttgcccgagcctcggcggtaaaccgaagcttttttttatccaggcctgcggcggtgaacagaaagatcatggcttcgaggttgccagtaccagccctgaagacgaatcccccgggtcaaatcctgaaccagatgcgacccctttccaggaaggactccgcacttttgaccagcttgacgccatttcctccctgccaacaccttccgacatatttgtaagctactccacctttccaggattcgtgagctggcgcgacccaaaatccggcagttggtatgttgaaaccctggacgatattttcgaacaatgggcccacagtgaggacctgcagtcccttcttctgcgcgtagccaatgccgtgtcagtcaaagggatttacaagcagatgccaggctgctttaatttcctgcgcaagaaactgttttttaagaccagtggctccggcgcaacaaatttctccttgctgaaacaggcaggcgacgttgaggaaaatcccggcccaatggccttaccagtgaccgccttgctcctgccgctggccttgctgctccacgccgccaggccggacatccagatgacacagactacatcctccctgtctgcctctctgggagacagagtcaccatcagttgcagggcaagtcaggacattagtaaatatttaaattggtatcagcagaaaccagatggaactgttaaactcctgatctaccatacatcaagattacactcaggagtcccatcaaggttcagtggcagtgggtctggaacagattattctctcaccattagcaacctggagcaagaagatattgccacttacttttgccaacagggtaatacgcttccgtacacgttcggaggggggactaagttggaaataacaggtggcggtggctcgggcggtggtgggtcgggtggcggcggatctgaggtgaaactgcaggagtcaggacctggcctggtggcgccctcacagagcctgtccgtcacatgcactgtctcaggggtctcattacccgactatggtgtaagctggattcgccagcctccacgaaagggtctggagtggctgggagtaatatggggtagtgaaaccacatactataattcagctctcaaatccagactgaccatcatcaaggacaactccaagagccaagttttcttaaaaatgaacagtctgcaaactgatgacacagccatttactactgtgccaaacattattactacggtggtagctatgctatggactactggggtcaaggaacctcagtcaccgtctcctcaaccacgacgccagcgccgcgaccaccaacaccggcgcccaccatcgcgtcgcagcccctgtccctgcgcccagaggcgtgccggccagcggcggggggcgcagtgcacacgagggggctggacttcgcctgtgatatctacatctgggcgcccttggccgggacttgtggggtccttctcctgtcactggttatcaccctttactgcaaacggggcagaaagaaactcctgtatatattcaaacaaccatttatgagaccagtacaaactactcaagaggaagatggctgtagctgccgatttccagaagaagaagaaggaggatgtgaactgagagtgaagttcagcaggagcgcagacgcccccgcgtaccagcagggccagaaccagctctataacgagctcaatctaggacgaagagaggagtacgatgttttggacaagagacgtggccgggaccctgagatggggggaaagccgagaaggaagaaccctcaggaaggcctgtacaatgaactgcagaaagataagatggcggaggcctacagtgagattgggatgaaaggcgagcgccggaggggcaaggggcacgatggcctttaccagggtctcagtacagccaccaaggacacctacgacgcccttcacatgcaggccctgccccctcgctaa

SEQ ID NO: 3019 - protein, 908 aa, Artificial Sequence
  source: /note="Description of Artificial Sequence: Synthetic polypeptide"
MLEGVQVETISPGDGRTFPKRGQTCVVHYTGMLEDGKKVDSSRDRNKPFKFMLGKQEVIRGWEEGVAQMSVGQRAKLTISPDYAYGATGHPGIIPPHATLVFDVELLKLESGGGSGASGFGDVGALESLRGNADLAYILSMEPCGHCLIINNVNFCRESGLRTRTGSNIDCEKLRRRFSSLHFMVEVKGDLTAKKMVLALLELAQQDHGALDCCVVVILSHGCQASHLQFPGAVYGTDGCPVSVEKIVNIFNGTSCPSLGGKPKLFFIQACGGEQKDHGFEVASTSPEDESPGSNPEPDATPFQEGLRTFDQLDAISSLPTPSDIFVSYSTFPGFVSWRDPKSGSWYVETLDDIFEQWAHSEDLQSLLLRVANAVSVKGIYKQMPGCFNFLRKKLFFKTSGSGATNFSLLKQAGDVEENPGPMALPVTALLLPLALLLHAARPDIQMTQTTSSLSASLGDRVTISCRASQDISKYLNWYQQKPDGTVKLLIYHTSRLHSGVPSRFSGSGSGTDYSLTISNLEQEDIATYFCQQGNTLPYTFGGGTKLEITGGGGSGGGGSGGGGSEVKLQESGPGLVAPSQSLSVTCTVSGVSLPDYGVSWIRQPPRKGLEWLGVIWGSETTYYNSALKSRLTIIKDNSKSQVFLKMNSLQTDDTAIYYCAKHYYYGGSYAMDYWGQGTSVTVSSTTTPAPRPPTPAPTIASQPLSLRPEACRPAAGGAVHTRGLDFACDIYIWAPLAGTCGVLLLSLVITLYCKRGRKKLLYIFKQPFMRPVQTTQEEDGCSCRFPEEEEGGCELRVKFSRSADAPAYQQGQNQLYNELNLGRREEYDVLDKRRGRDPEMGGKPRRKNPQEGLYNELQKDKMAEAYSEIGMKGERRRGKGHDGLYQGLSTATKDTYDALHMQALPPR

SEQ ID NO: 3020 - DNA, 2741 bp, Artificial Sequence
  source: /note="Description of Artificial Sequence: Synthetic polynucleotide"
atggccttaccagtgaccgccttgctcctgccgctggccttgctgctccacgccgccaggccggacatccagatgacacagactacatcctccctgtctgcctctctgggagacagagtcaccatcagttgcagggcaagtcaggacattagtaaatatttaaattggtatcagcagaaaccagatggaactgttaaactcctgatctaccatacatcaagattacactcaggagtcccatcaaggttcagtggcagtgggtctggaacagattattctctcaccattagcaacctggagcaagaagatattgccacttacttttgccaacagggtaatacgcttccgtacacgttcggaggggggactaagttggaaataacaggtggcggtggctcgggcggtggtgggtcgggtggcggcggatctgaggtgaaactgcaggagtcaggacctggcctggtggcgccctcacagagcctgtccgtcacatgcactgtctcaggggtctcattacccgactatggtgtaagctggattcgccagcctccacgaaagggtctggagtggctgggagtaatatggggtagtgaaaccacatactataattcagctctcaaatccagactgaccatcatcaaggacaactccaagagccaagttttcttaaaaatgaacagtctgcaaactgatgacacagccatttactactgtgccaaacattattactacggtggtagctatgctatggactactggggtcaaggaacctcagtcaccgtctcctcaaccacgacgccagcgccgcgaccaccaacaccggcgcccaccatcgcgtcgcagcccctgtccctgcgcccagaggcgtgccggccagcggcggggggcgcagtgcacacgagggggctggacttcgcctgtgatatctacatctgggcgcccttggccgggacttgtggggtccttctcctgtcactggttatcaccctttactgcaaacggggcagaaagaaactcctgtatatattcaaacaaccatttatgagaccagtacaaactactcaagaggaagatggctgtagctgccgatttccagaagaagaagaaggaggatgtgaactgagagtgaagttcagcaggagcgcagacgcccccgcgtaccagcagggccagaaccagctctataacgagctcaatctaggacgaagagaggagtacgatgttttggacaagagacgtggccgggaccctgagatggggggaaagccgagaaggaagaaccctcaggaaggcctgtacaatgaactgcagaaagataagatggcggaggcctacagtgagattgggatgaaaggcgagcgccggaggggcaaggggcacgatggcctttaccagggtctcagtacagccaccaaggacacctacgacgcccttcacatgcaggccctgccccctcgctcggaagcgacggggctccggcgcaacaaatttctccttgctgaaacaggcaggcgacgttgaggaaaatcccggcccaggggttcaggtggagactatcagcccgggcgacggacggacattcccaaagcgcgggcagacgtgtgtggtgcattacaccgggatgcttgaggacggaaagaaagtggactcttcccgagaccgaaataaaccattcaagttcatgttgggcaagcaggaggttatcagagggtgggaggagggcgtcgctcagatgagtgtcggacagagggccaagctcacgatctcccctgattacgcctacggggcaactggtcaccccggaatcatcccccctcacgcaaccctcgtgttcgacgtcgagctgctcaaactggaatcaggcggaggcagtggcgggtttggcgatgtcggtgcccttgaaagcttgagaggaaatgccgatctcgcttacatcttgagcatggagccctgtgggcactgtctgatcatcaacaatgttaacttttgccgggagtccggcctgcgcacacgcacaggctccaacattgactgcgaaaaacttcgaaggaggtttagctctctgcatttcatggtagaggtgaagggggatctgaccgccaagaaaatggttctcgcccttctcgagcttgcgcagcaggaccatggagcgcttgactgttgtgtcgttgtgatactgagccatggctgtcaggcttcccatctccagtttccaggggccgtgtacggaaccgatggatgccctgtgtcagttgaaaagatcgtaaacatctttaacggaacatcttgcccgagcctcggcggtaaaccgaagcttttttttatccaggcctgcggcggtgaacagaaagatcatggcttcgaggttgccagtaccagccctgaagacgaatcccccgggtcaaatcctgaaccagatgcgacccctttccaggaaggactccgcacttttgaccagcttgacgccatttcctccctgccaacaccttccgacatatttgtaagctactccacctttccaggattcgtgagctggcgcgacccaaaatccggcagttggtatgttgaaaccctggacgatatcttcgaacaatgggcccacagtgaggacctgcagtcccttcttctgcgcgtagccaatgccgtgtcagtcaaagggatttacaagcagatgccaggctgctttaatttcctgcgcaagaaactgttttttaagaccagttgagtcgacggaggaggag

SEQ ID NO: 3021 - protein, 907 aa, Artificial Sequence
  source: /note="Description of Artificial Sequence: Synthetic polypeptide"
MALPVTALLLPLALLLHAARPDIQMTQTTSSLSASLGDRVTISCRASQDISKYLNWYQQKPDGTVKLLIYHTSRLHSGVPSRFSGSGSGTDYSLTISNLEQEDIATYFCQQGNTLPYTFGGGTKLEITGGGGSGGGGSGGGGSEVKLQESGPGLVAPSQSLSVTCTVSGVSLPDYGVSWIRQPPRKGLEWLGVIWGSETTYYNSALKSRLTIIKDNSKSQVFLKMNSLQTDDTAIYYCAKHYYYGGSYAMDYWGQGTSVTVSSTTTPAPRPPTPAPTIASQPLSLRPEACRPAAGGAVHTRGLDFACDIYIWAPLAGTCGVLLLSLVITLYCKRGRKKLLYIFKQPFMRPVQTTQEEDGCSCRFPEEEEGGCELRVKFSRSADAPAYQQGQNQLYNELNLGRREEYDVLDKRRGRDPEMGGKPRRKNPQEGLYNELQKDKMAEAYSEIGMKGERRRGKGHDGLYQGLSTATKDTYDALHMQALPPRRKRRGSGATNFSLLKQAGDVEENPGPGVQVETISPGDGRTFPKRGQTCVVHYTGMLEDGKKVDSSRDRNKPFKFMLGKQEVIRGWEEGVAQMSVGQRAKLTISPDYAYGATGHPGIIPPHATLVFDVELLKLESGGGSGGFGDVGALESLRGNADLAYILSMEPCGHCLIINNVNFCRESGLRTRTGSNIDCEKLRRRFSSLHFMVEVKGDLTAKKMVLALLELAQQDHGALDCCVVVILSHGCQASHLQFPGAVYGTDGCPVSVEKIVNIFNGTSCPSLGGKPKLFFIQACGGEQKDHGFEVASTSPEDESPGSNPEPDATPFQEGLRTFDQLDAISSLPTPSDIFVSYSTFPGFVSWRDPKSGSWYVETLDDIFEQWAHSEDLQSLLLRVANAVSVKGIYKQMPGCFNFLRKKLFFKTS

SEQ ID NO: 3022 - DNA, 1479 bp, Artificial Sequence
  source: /note="Description of Artificial Sequence: Synthetic polynucleotide"
atggccttaccagtgaccgccttgctcctgccgctggccttgctgctccacgccgccaggccgggatccgatattcaacttacacagtcccctagttccttgtccgcctccgtcggcgacagagttaccatgacttgtcgagcgtcttctagcgtttcctacattcattggttccaacagaagcccggaaaggcaccaaaaccttggatctacgccacgtccaatttggctagtggtgttccggtgcgattttccgggtcaggtagcgggacggactatacttttaccatttcaagccttcagcctgaagacatcgcgacgtactattgtcagcagtggacctctaaccctcctacctttggcggtggaacaaagctggagatcaaacgaggcgggggtggctctgggggaggaggttccggtgggggaggctctcaagtacaactgcaacaaagtggggctgaagtgaagaagcccggttcttcagtcaaagtatcatgtaaggcaagtggttatacttttacgtcttataacatgcattgggtaaagcaagcccctggtcagggcctcgagtggattggtgcgatctaccctggaatgggtgatacgagctataatcagaaattcaaggggaaagccaccttgactgcagacgaatctacgaacacggcttacatggagcttagctcactcagatcagaggatacagccttttactactgcgctagatcaacttattacggaggagactggtattttgatgtatggggtcaggggaccacagtcactgttagctctgctagcaccacgacgccagcgccgcgaccaccaacaccggcgcccaccatcgcgtcgcagcccctgtccctgcgcccagaggcgtgccggccagcggcggggggcgcagtgcacacgagggggctggacttcgcctgtgattccggaatctacatctgggcgcccttggccgggacttgtggggtccttctcctgtcactggttatcaccctttactgcaaacggggcagaaagaaactcctgtatatattcaaacaaccatttatgagaccagtacaaactactcaagaggaagatggctgtagctgccgatttccagaagaagaagaaggaggatgtgaactgagagtgaagttcagcaggagcgcagacgcccccgcgtaccagcagggccagaaccagctctataacgagctcaatctaggacgaagagaggagtacgatgttttggacaagagacgtggccgggaccctgagatggggggaaagccgagaaggaagaaccctcaggaaggcctgtacaatgaactgcagaaagataagatggcggaggcctacagtgagattgggatgaaaggcgagcgccggaggggcaaggggcacgatggcctttaccagggtctcagtacagccaccaaggacacctacgacgcccttcacatgcaggccctgccccctcgc

SEQ ID NO: 3023 - protein, 494 aa, Artificial Sequence
  source: /note="Description of Artificial Sequence: Synthetic polypeptide"
MALPVTALLLPLALLLHAARPGSDIQLTQSPSSLSASVGDRVTMTCRASSSVSYIHWFQQKPGKAPKPWIYATSNLASGVPVRFSGSGSGTDYTFTISSLQPEDIATYYCQQWTSNPPTFGGGTKLEIKRGGGGSGGGGSGGGGSQVQLQQSGAEVKKPGSSVKVSCKASGYTFTSYNMHWVKQAPGQGLEWIGAIYPGMGDTSYNQKFKGKATLTADESTNTAYMELSSLRSEDTAFYYCARSTYYGGDWYFDVWGQGTTVTVSSASTTTPAPRPPTPAPTIASQPLSLRPEACRPAAGGAVHTRGLDFACDSGIYIWAPLAGTCGVLLLSLVITLYCKRGRKKLLYIFKQPFMRPVQTTQEEDGCSCRFPEEEEGGCELRVKFSRSADAPAYQQGQNQLYNELNLGRREEYDVLDKRRGRDPEMGGKPRRKNPQEGLYNELQKDKMAEAYSEIGMKGERRRGKGHDGLYQGLSTATKDTYDALHMQALPPRZ

SEQ ID NO: 3024 - DNA, 2733 bp, Artificial Sequence
  source: /note="Description of Artificial Sequence: Synthetic polynucleotide"
atggctctgcctgtgacagctctgctgctgcctctggccctgctgctgcatgctgccagacctggctccgatattcaacttacacagtcccctagttccttgtccgcctccgtcggcgacagagttaccatgacttgtcgagcgtcttctagcgtttcctacattcattggttccaacagaagcccggaaaggcaccaaaaccttggatctacgccacgtccaatttggctagtggtgttccggtgcgattttccgggtcaggtagcgggacggactatacttttaccatttcaagccttcagcctgaagacatcgcgacgtactattgtcagcagtggacctctaaccctcctacctttggcggtggaacaaagctggagatcaaacgaggcgggggtggctctgggggaggaggttccggtgggggaggctctcaagtacaactgcaacaaagtggggctgaagtgaagaagcccggttcttcagtcaaagtatcatgtaaggcaagtggttatacttttacgtcttataacatgcattgggtaaagcaagcccctggtcagggcctcgagtggattggtgcgatctaccctggaatgggtgatacgagctataatcagaaattcaaggggaaagccaccttgactgcagacgaatctacgaacacggcttacatggagcttagctcactcagatcagaggatacagccttttactactgcgctagatcaacttattacggaggagactggtattttgatgtatggggtcaggggaccacagtcactgttagctctgctagcaccacgacgccagcgccgcgaccaccaacaccggcgcccaccatcgcgtcgcagcccctgtccctgcgcccagaggcgtgccggccagcggcggggggcgcagtgcacacgagggggctggacttcgcctgtgattccggaatctacatctgggcgcccttggccgggacttgtggggtccttctcctgtcactggttatcaccctttactgcaaacggggcagaaagaaactcctgtatatattcaaacaaccatttatgagaccagtacaaactactcaagaggaagatggctgtagctgccgatttccagaagaagaagaaggaggatgtgaactgagagtgaagttcagcaggagcgcagacgcccccgcgtaccagcagggccagaaccagctctataacgagctcaatctaggacgaagagaggagtacgatgttttggacaagagacgtggccgggaccctgagatggggggaaagccgagaaggaagaaccctcaggaaggcctgtacaatgaactgcagaaagataagatggcggaggcctacagtgagattgggatgaaaggcgagcgccggaggggcaaggggcacgatggcctttaccagggtctcagtacagccaccaaggacacctacgacgcccttcacatgcaggccctgccccctcgcggctccggcgcaacaaatttctccttgctgaaacaggcaggcgacgttgaggaaaatcccggcccaggggttcaggtggagactatcagcccgggcgacggacggacattcccaaagcgcgggcagacgtgtgtggtgcattacaccgggatgcttgaggacggaaagaaagtggactcttcccgagaccgaaataaaccattcaagttcatgttgggcaagcaggaggttatcagagggtgggaggagggcgtcgctcagatgagtgtcggacagagggccaagctcacgatctcccctgattacgcctacggggcaactggtcaccccggaatcatcccccctcacgcaaccctcgtgttcgacgtcgagctgctcaaactggaatcaggcggaggcagtggcgggtttggcgatgtcggtgcccttgaaagcttgagaggaaatgccgatctcgcttacatcttgagcatggagccctgtgggcactgtctgatcatcaacaatgttaacttttgccgggagtccggcctgcgcacacgcacaggctccaacattgactgcgaaaaacttcgaaggaggtttagctctctgcatttcatggtagaggtgaagggggatctgaccgccaagaaaatggttctcgcccttctcgagcttgcgcagcaggaccatggagcgcttgactgttgtgtcgttgtgatactgagccatggctgtcaggcttcccatctccagtttccaggggccgtgtacggaaccgatggatgccctgtgtcagttgaaaagatcgtaaacatctttaacggaacatcttgcccgagcctcggcggtaaaccgaagcttttttttatccaggcctgcggcggtgaacagaaagatcatggcttcgaggttgccagtaccagccctgaagacgaatcccccgggtcaaatcctgaaccagatgcgacccctttccaggaaggactccgcacttttgaccagcttgacgccatttcctccctgccaacaccttccgacatatttgtaagctactccacctttccaggattcgtgagctggcgcgacccaaaatccggcagttggtatgttgaaaccctggacgatatcttcgaacaatgggcccacagtgaggacctgcagtcccttcttctgcgcgtagccaatgccgtgtcagtcaaagggatttacaagcagatgccaggctgctttaatttcctgcgcaagaaactgttttttaagaccagttga

SEQ ID NO: 3025 - protein, 911 aa, Artificial Sequence
  source: /note="Description of Artificial Sequence: Synthetic polypeptide"
MALPVTALLLPLALLLHAARPGSDIQLTQSPSSLSASVGDRVTMTCRASSSVSYIHWFQQKPGKAPKPWIYATSNLASGVPVRFSGSGSGTDYTFTISSLQPEDIATYYCQQWTSNPPTFGGGTKLEIKRGGGGSGGGGSGGGGSQVQLQQSGAEVKKPGSSVKVSCKASGYTFTSYNMHWVKQAPGQGLEWIGAIYPGMGDTSYNQKFKGKATLTADESTNTAYMELSSLRSEDTAFYYCARSTYYGGDWYFDVWGQGTTVTVSSASTTTPAPRPPTPAPTIASQPLSLRPEACRPAAGGAVHTRGLDFACDSGIYIWAPLAGTCGVLLLSLVITLYCKRGRKKLLYIFKQPFMRPVQTTQEEDGCSCRFPEEEEGGCELRVKFSRSADAPAYQQGQNQLYNELNLGRREEYDVLDKRRGRDPEMGGKPRRKNPQEGLYNELQKDKMAEAYSEIGMKGERRRGKGHDGLYQGLSTATKDTYDALHMQALPPRGSGATNFSLLKQAGDVEENPGPGVQVETISPGDGRTFPKRGQTCVVHYTGMLEDGKKVDSSRDRNKPFKFMLGKQEVIRGWEEGVAQMSVGQRAKLTISPDYAYGATGHPGIIPPHATLVFDVELLKLESGGGSGGFGDVGALESLRGNADLAYILSMEPCGHCLIINNVNFCRESGLRTRTGSNIDCEKLRRRFSSLHFMVEVKGDLTAKKMVLALLELAQQDHGALDCCVVVILSHGCQASHLQFPGAVYGTDGCPVSVEKIVNIFNGTSCPSLGGKPKLFFIQACGGEQKDHGFEVASTSPEDESPGSNPEPDATPFQEGLRTFDQLDAISSLPTPSDIFVSYSTFPGFVSWRDPKSGSWYVETLDDIFEQWAHSEDLQSLLLRVANAVSVKGIYKQMPGCFNFLRKKLFFKTSZ

SEQ ID NO: 3026 - DNA, 2745 bp, Artificial Sequence
  source: /note="Description of Artificial Sequence: Synthetic polynucleotide"
atgctcgagggggttcaggtggagactatcagcccgggcgacggacggacattcccaaagcgcgggcagacgtgtgtggtgcattacaccgggatgcttgaggacggaaagaaagtggactcttcccgagaccgaaataaaccattcaagttcatgttgggcaagcaggaggttatcagagggtgggaggagggcgtcgctcagatgagtgtcggacagagggccaagctcacgatctcccctgattacgcctacggggcaactggtcaccccggaatcatcccccctcacgcaaccctcgtgttcgacgtcgagctgctcaaactggaatcaggcggaggcagtggcgctagcgggtttggcgatgtcggtgcccttgaaagcttgagaggaaatgccgatctcgcttacatcttgagcatggagccctgtgggcactgtctgatcatcaacaatgttaacttttgccgggagtccggcctgcgcacacgcacaggctccaacattgactgcgaaaaacttcgaaggaggtttagctctctgcatttcatggtagaggtgaagggggatctgaccgccaagaaaatggttctcgcccttctcgagcttgcgcagcaggaccatggagcgcttgactgttgtgtcgttgtgatactgagccatggctgtcaggcttcccatctccagtttccaggggccgtgtacggaaccgatggatgccctgtgtcagttgaaaagatcgtaaacatctttaacggaacatcttgcccgagcctcggcggtaaaccgaagcttttttttatccaggcctgcggcggtgaacagaaagatcatggcttcgaggttgccagtaccagccctgaagacgaatcccccgggtcaaatcctgaaccagatgcgacccctttccaggaaggactccgcacttttgaccagcttgacgccatttcctccctgccaacaccttccgacatatttgtaagctactccacctttccaggattcgtgagctggcgcgacccaaaatccggcagttggtatgttgaaaccctggacgatattttcgaacaatgggcccacagtgaggacctgcagtcccttcttctgcgcgtagccaatgccgtgtcagtcaaagggatttacaagcagatgccaggctgctttaatttcctgcgcaagaaactgttttttaagaccagtggctccggcgcaacaaatttctccttgctgaaacaggcaggcgacgttgaggaaaatcccggcccaatggccttaccagtgaccgccttgctcctgccgctggccttgctgctccacgccgccaggccgggatccgatattcaacttacacagtcccctagttccttgtccgcctccgtcggcgacagagttaccatgacttgtcgagcgtcttctagcgtttcctacattcattggttccaacagaagcccggaaaggcaccaaaaccttggatctacgccacgtccaatttggctagtggtgttccggtgcgattttccgggtcaggtagcgggacggactatacttttaccatttcaagccttcagcctgaagacatcgcgacgtactattgtcagcagtggacctctaaccctcctacctttggcggtggaacaaagctggagatcaaacgaggcgggggtggctctgggggaggaggttccggtgggggaggctctcaagtacaactgcaacaaagtggggctgaagtgaagaagcccggttcttcagtcaaagtatcatgtaaggcaagtggttatacttttacgtcttataacatgcattgggtaaagcaagcccctggtcagggcctcgagtggattggtgcgatctaccctggaatgggtgatacgagctataatcagaaattcaaggggaaagccaccttgactgcagacgaatctacgaacacggcttacatggagcttagctcactcagatcagaggatacagccttttactactgcgctagatcaacttattacggaggagactggtattttgatgtatggggtcaggggaccacagtcactgttagctctgctagcaccacgacgccagcgccgcgaccaccaacaccggcgcccaccatcgcgtcgcagcccctgtccctgcgcccagaggcgtgccggccagcggcggggggcgcagtgcacacgagggggctggacttcgcctgtgattccggaatctacatctgggcgcccttggccgggacttgtggggtccttctcctgtcactggttatcaccctttactgcaaacggggcagaaagaaactcctgtatatattcaaacaaccatttatgagaccagtacaaactactcaagaggaagatggctgtagctgccgatttccagaagaagaagaaggaggatgtgaactgagagtgaagttcagcaggagcgcagacgcccccgcgtaccagcagggccagaaccagctctataacgagctcaatctaggacgaagagaggagtacgatgttttggacaagagacgtggccgggaccctgagatggggggaaagccgagaaggaagaaccctcaggaaggcctgtacaatgaactgcagaaagataagatggcggaggcctacagtgagattgggatgaaaggcgagcgccggaggggcaaggggcacgatggcctttaccagggtctcagtacagccaccaaggacacctacgacgcccttcacatgcaggccctgccccctcgc

SEQ ID NO: 3027 - protein, 916 aa, Artificial Sequence
  source: /note="Description of Artificial Sequence: Synthetic polypeptide"
MLEGVQVETISPGDGRTFPKRGQTCVVHYTGMLEDGKKVDSSRDRNKPFKFMLGKQEVIRGWEEGVAQMSVGQRAKLTISPDYAYGATGHPGIIPPHATLVFDVELLKLESGGGSGASGFGDVGALESLRGNADLAYILSMEPCGHCLIINNVNFCRESGLRTRTGSNIDCEKLRRRFSSLHFMVEVKGDLTAKKMVLALLELAQQDHGALDCCVVVILSHGCQASHLQFPGAVYGTDGCPVSVEKIVNIFNGTSCPSLGGKPKLFFIQACGGEQKDHGFEVASTSPEDESPGSNPEPDATPFQEGLRTFDQLDAISSLPTPSDIFVSYSTFPGFVSWRDPKSGSWYVETLDDIFEQWAHSEDLQSLLLRVANAVSVKGIYKQMPGCFNFLRKKLFFKTSGSGATNFSLLKQAGDVEENPGPMALPVTALLLPLALLLHAARPGSDIQLTQSPSSLSASVGDRVTMTCRASSSVSYIHWFQQKPGKAPKPWIYATSNLASGVPVRFSGSGSGTDYTFTISSLQPEDIATYYCQQWTSNPPTFGGGTKLEIKRGGGGSGGGGSGGGGSQVQLQQSGAEVKKPGSSVKVSCKASGYTFTSYNMHWVKQAPGQGLEWIGAIYPGMGDTSYNQKFKGKATLTADESTNTAYMELSSLRSEDTAFYYCARSTYYGGDWYFDVWGQGTTVTVSSASTTTPAPRPPTPAPTIASQPLSLRPEACRPAAGGAVHTRGLDFACDSGIYIWAPLAGTCGVLLLSLVITLYCKRGRKKLLYIFKQPFMRPVQTTQEEDGCSCRFPEEEEGGCELRVKFSRSADAPAYQQGQNQLYNELNLGRREEYDVLDKRRGRDPEMGGKPRRKNPQEGLYNELQKDKMAEAYSEIGMKGERRRGKGHDGLYQGLSTATKDTYDALHMQALPPRZ

SEQ ID NO: 3028 - DNA, 3060 bp, Artificial Sequence
  source: /note="Description of Artificial Sequence: Synthetic polynucleotide"
atggccttaccagtgaccgccttgctcctgccgctggccttgctgctccacgccgccaggccgggatccgacatccagatgacacagactacatcctccctgtctgcctctctgggagacagagtcaccatcagttgcagggcaagtcaggacattagtaaatatttaaattggtatcagcagaaaccagatggaactgttaaactcctgatctaccatacatcaagattacactcaggagtcccatcaaggttcagtggcagtgggtctggaacagattattctctcaccattagcaacctggagcaagaagatattgccacttacttttgccaacagggtaatacgcttccgtacacgttcggaggggggactaagttggaaataacaggtggcggtggctcgggcggtggtgggtcgggtggcggcggatctgaggtgaaactgcaggagtcaggacctggcctggtggcgccctcacagagcctgtccgtcacatgcactgtctcaggggtctcattacccgactatggtgtaagctggattcgccagcctccacgaaagggtctggagtggctgggagtaatatggggtagtgaaaccacatactataattcagctctcaaatccagactgaccatcatcaaggacaactccaagagccaagttttcttaaaaatgaacagtctgcaaactgatgacacagccatttactactgtgccaaacattattactacggtggtagctatgctatggactactggggtcaaggaacctcagtcaccgtctcctcagctagcaccacgacgccagcgccgcgaccaccaacaccggcgcccaccatcgcgtcgcagcccctgtccctgcgcccagaggcgtgccggccagcggcggggggcgcagtgcacacgagggggctggacttcgcctgtgattccggaatctacatctgggcccctctggccggcacctgtggcgtgctgctgctgtctctcgtgatcaccctgtactgcaagcggggcagaaagaagctgctgtacatcttcaagcagcccttcatgcggcccgtgcagaccacccaggaagaggacggctgctcctgcagattccccgaggaagaagaaggcggctgcgagctgagagtgaagttcagcagaagcgccgacgcccctgcctatcagcagggccagaaccagctgtacaacgagctgaacctgggcagacgggaagagtacgacgtgctggacaagcggagaggcagggaccctgagatgggcggcaagcccagaagaaagaacccccaggaaggcctgtataacgaactgcagaaagacaagatggccgaggcctacagcgagatcggaatgaagggcgagcggagaagaggcaagggccacgatggcctgtaccagggcctgagcaccgccaccaaggacacctatgacgccctgcacatgcaggccctgcctccaagaggaagcggcgccaccaatttcagcctgctgaaacaggccggcgacgtggaagagaaccctggccctagaggcgtgcaggtggaaaccatctctcccggcgacggcagaaccttccctaagaggggccagacctgcgtggtgcactacaccggcatgctggaagatggcaagaagatggacagctcccgggaccggaacaagcccttcaagttcatgctgggcaagcaggaagtgatccggggctgggaagagggcgtggcacagatgtctgtgggccagagagccaagctgaccatcagccccgattacgcctacggcgccacaggccaccctggcatcattcctccacacgccacactggtgttcgatgtggaactgctgaagctggaaacccggggagtgcaggtggaaacaatcagccctggcgacggccggacctttccaaaacggggacagacatgtgtggtgcattatacagggatgctggaagatgggaaaaaaatggatagcagccgcgaccgcaacaaaccttttaagtttatgctggggaaacaggaagtgattagaggctgggaagagggggtggcacagatgagcgtgggacagcgggccaaactgacaatctcccccgactatgcctatggggccaccggacaccccggaatcatcccacctcatgctaccctggtgtttgacgtggaactgctgaaactggaaacaagcggcggaggcagcggcggctttggagatgtgggagccctggaaagcctgcggggcaatgccgatctggcctacatcctgagcatggaaccctgcggccactgcctgattatcaacaacgtgaacttctgcagagagagcggcctgcggaccagaaccggcagcaacatcgactgcgagaagctgcggcggagattcagcagcctgcacttcatggtggaagtgaagggggacctgaccgccaagaaaatggtgctggctctgctggaactggcccagcaggatcatggcgccctggactgttgcgtggtcgtgatcctgagccacggctgccaggccagccatctgcagtttcccggcgctgtgtatggcaccgatggctgccctgtgtccgtggaaaagatcgtgaatatcttcaacggcaccagctgccccagcctgggcggaaagcctaagctgttctttattcaagcctgtgggggcgagcagaaggaccacggatttgaggtggccagcacctcccccgaggatgagagccctggcagcaaccctgagcctgacgccaccccattccaggaaggactgcggaccttcgaccagctggacgccatctctagcctgcccacccccagcgacatcttcgtgtcctacagcaccttccctggctttgtgtcctggcgggaccccaagtccggctcttggtacgtggaaaccctggacgacatctttgagcagtgggcccatagcgaggacctgcagagcctgctgctgagggtggccaatgccgtgtccgtgaagggcatctacaagcagatgcccggctgcttcaacttcctgcggaagaagctgtttttcaagaccagc

SEQ ID NO: 3029 - protein, 1020 aa, Artificial Sequence
  source: /note="Description of Artificial Sequence: Synthetic polypeptide"
MALPVTALLLPLALLLHAARPGSDIQMTQTTSSLSASLGDRVTISCRASQDISKYLNWYQQKPDGTVKLLIYHTSRLHSGVPSRFSGSGSGTDYSLTISNLEQEDIATYFCQQGNTLPYTFGGGTKLEITGGGGSGGGGSGGGGSEVKLQESGPGLVAPSQSLSVTCTVSGVSLPDYGVSWIRQPPRKGLEWLGVIWGSETTYYNSALKSRLTIIKDNSKSQVFLKMNSLQTDDTAIYYCAKHYYYGGSYAMDYWGQGTSVTVSSASTTTPAPRPPTPAPTIASQPLSLRPEACRPAAGGAVHTRGLDFACDSGIYIWAPLAGTCGVLLLSLVITLYCKRGRKKLLYIFKQPFMRPVQTTQEEDGCSCRFPEEEEGGCELRVKFSRSADAPAYQQGQNQLYNELNLGRREEYDVLDKRRGRDPEMGGKPRRKNPQEGLYNELQKDKMAEAYSEIGMKGERRRGKGHDGLYQGLSTATKDTYDALHMQALPPRGSGATNFSLLKQAGDVEENPGPRGVQVETISPGDGRTFPKRGQTCVVHYTGMLEDGKKMDSSRDRNKPFKFMLGKQEVIRGWEEGVAQMSVGQRAKLTISPDYAYGATGHPGIIPPHATLVFDVELLKLETRGVQVETISPGDGRTFPKRGQTCVVHYTGMLEDGKKMDSSRDRNKPFKFMLGKQEVIRGWEEGVAQMSVGQRAKLTISPDYAYGATGHPGIIPPHATLVFDVELLKLETSGGGSGGFGDVGALESLRGNADLAYILSMEPCGHCLIINNVNFCRESGLRTRTGSNIDCEKLRRRFSSLHFMVEVKGDLTAKKMVLALLELAQQDHGALDCCVVVILSHGCQASHLQFPGAVYGTDGCPVSVEKIVNIFNGTSCPSLGGKPKLFFIQACGGEQKDHGFEVASTSPEDESPGSNPEPDATPFQEGLRTFDQLDAISSLPTPSDIFVSYSTFPGFVSWRDPKSGSWYVETLDDIFEQWAHSEDLQSLLLRVANAVSVKGIYKQMPGCFNFLRKKLFFKTS

SEQ ID NO: 3030 - DNA, 3063 bp, Artificial Sequence
  source: /note="Description of Artificial Sequence: Synthetic polynucleotide"
atggccttaccagtgaccgccttgctcctgccgctggccttgctgctccacgccgccaggccgggatccgatattcaacttacacagtcccctagttccttgtccgcctccgtcggcgacagagttaccatgacttgtcgagcgtcttctagcgtttcctacattcattggttccaacagaagcccggaaaggcaccaaaaccttggatctacgccacgtccaatttggctagtggtgttccggtgcgattttccgggtcaggtagcgggacggactatacttttaccatttcaagccttcagcctgaagacatcgcgacgtactattgtcagcagtggacctctaaccctcctacctttggcggtggaacaaagctggagatcaaacgaggcgggggtggctctgggggaggaggttccggtgggggaggctctcaagtacaactgcaacaaagtggggctgaagtgaagaagcccggttcttcagtcaaagtatcatgtaaggcaagtggttatacttttacgtcttataacatgcattgggtaaagcaagcccctggtcagggcctcgagtggattggtgcgatctaccctggaatgggtgatacgagctataatcagaaattcaaggggaaagccaccttgactgcagacgaatctacgaacacggcttacatggagcttagctcactcagatcagaggatacagccttttactactgcgctagatcaacttattacggaggagactggtattttgatgtatggggtcaggggaccacagtcactgttagctctgctagcaccacgacgccagcgccgcgaccaccaacaccggcgcccaccatcgcgtcgcagcccctgtccctgcgcccagaggcgtgccggccagcggcggggggcgcagtgcacacgagggggctggacttcgcctgtgattccggaatctacatctgggcgcccttggccgggacttgtggggtccttctcctgtcactggttatcaccctttactgcaaacggggcagaaagaaactcctgtatatattcaaacaaccatttatgagaccagtacaaactactcaagaggaagatggctgtagctgccgatttccagaagaagaagaaggaggatgtgaactgagagtgaagttcagcaggagcgcagacgcccccgcgtaccagcagggccagaaccagctctataacgagctcaatctaggacgaagagaggagtacgatgttttggacaagagacgtggccgggaccctgagatggggggaaagccgagaaggaagaaccctcaggaaggcctgtacaatgaactgcagaaagataagatggcggaggcctacagtgagattgggatgaaaggcgagcgccggaggggcaaggggcacgatggcctttaccagggtctcagtacagccaccaaggacacctacgacgcccttcacatgcaggccctgccccctcgcggaagcggcgccaccaatttcagcctgctgaaacaggccggcgacgtggaagagaaccctggccctagaggcgtgcaggtggaaaccatctctcccggcgacggcagaaccttccctaagaggggccagacctgcgtggtgcactacaccggcatgctggaagatggcaagaagatggacagctcccgggaccggaacaagcccttcaagttcatgctgggcaagcaggaagtgatccggggctgggaagagggcgtggcacagatgtctgtgggccagagagccaagctgaccatcagccccgattacgcctacggcgccacaggccaccctggcatcattcctccacacgccacactggtgttcgatgtggaactgctgaagctggaaacccggggagtgcaggtggaaacaatcagccctggcgacggccggacctttccaaaacggggacagacatgtgtggtgcattatacagggatgctggaagatgggaaaaaaatggatagcagccgcgaccgcaacaaaccttttaagtttatgctggggaaacaggaagtgattagaggctgggaagagggggtggcacagatgagcgtgggacagcgggccaaactgacaatctcccccgactatgcctatggggccaccggacaccccggaatcatcccacctcatgctaccctggtgtttgacgtggaactgctgaaactggaaacaagcggcggaggcagcggcggctttggagatgtgggagccctggaaagcctgcggggcaatgccgatctggcctacatcctgagcatggaaccctgcggccactgcctgattatcaacaacgtgaacttctgcagagagagcggcctgcggaccagaaccggcagcaacatcgactgcgagaagctgcggcggagattcagcagcctgcacttcatggtggaagtgaagggggacctgaccgccaagaaaatggtgctggctctgctggaactggcccagcaggatcatggcgccctggactgttgcgtggtcgtgatcctgagccacggctgccaggccagccatctgcagtttcccggcgctgtgtatggcaccgatggctgccctgtgtccgtggaaaagatcgtgaatatcttcaacggcaccagctgccccagcctgggcggaaagcctaagctgttctttattcaagcctgtgggggcgagcagaaggaccacggatttgaggtggccagcacctcccccgaggatgagagccctggcagcaaccctgagcctgacgccaccccattccaggaaggactgcggaccttcgaccagctggacgccatctctagcctgcccacccccagcgacatcttcgtgtcctacagcaccttccctggctttgtgtcctggcgggaccccaagtccggctcttggtacgtggaaaccctggacgacatctttgagcagtgggcccatagcgaggacctgcagagcctgctgctgagggtggccaatgccgtgtccgtgaagggcatctacaagcagatgcccggctgcttcaacttcctgcggaagaagctgtttttcaagaccagc

SEQ ID NO: 3031 - protein, 1021 aa, Artificial Sequence
  source: /note="Description of Artificial Sequence: Synthetic polypeptide"
MALPVTALLLPLALLLHAARPGSDIQLTQSPSSLSASVGDRVTMTCRASSSVSYIHWFQQKPGKAPKPWIYATSNLASGVPVRFSGSGSGTDYTFTISSLQPEDIATYYCQQWTSNPPTFGGGTKLEIKRGGGGSGGGGSGGGGSQVQLQQSGAEVKKPGSSVKVSCKASGYTFTSYNMHWVKQAPGQGLEWIGAIYPGMGDTSYNQKFKGKATLTADESTNTAYMELSSLRSEDTAFYYCARSTYYGGDWYFDVWGQGTTVTVSSASTTTPAPRPPTPAPTIASQPLSLRPEACRPAAGGAVHTRGLDFACDSGIYIWAPLAGTCGVLLLSLVITLYCKRGRKKLLYIFKQPFMRPVQTTQEEDGCSCRFPEEEEGGCELRVKFSRSADAPAYQQGQNQLYNELNLGRREEYDVLDKRRGRDPEMGGKPRRKNPQEGLYNELQKDKMAEAYSEIGMKGERRRGKGHDGLYQGLSTATKDTYDALHMQALPPRGSGATNFSLLKQAGDVEENPGPRGVQVETISPGDGRTFPKRGQTCVVHYTGMLEDGKKMDSSRDRNKPFKFMLGKQEVIRGWEEGVAQMSVGQRAKLTISPDYAYGATGHPGIIPPHATLVFDVELLKLETRGVQVETISPGDGRTFPKRGQTCVVHYTGMLEDGKKMDSSRDRNKPFKFMLGKQEVIRGWEEGVAQMSVGQRAKLTISPDYAYGATGHPGIIPPHATLVFDVELLKLETSGGGSGGFGDVGALESLRGNADLAYILSMEPCGHCLIINNVNFCRESGLRTRTGSNIDCEKLRRRFSSLHFMVEVKGDLTAKKMVLALLELAQQDHGALDCCVVVILSHGCQASHLQFPGAVYGTDGCPVSVEKIVNIFNGTSCPSLGGKPKLFFIQACGGEQKDHGFEVASTSPEDESPGSNPEPDATPFQEGLRTFDQLDAISSLPTPSDIFVSYSTFPGFVSWRDPKSGSWYVETLDDIFEQWAHSEDLQSLLLRVANAVSVKGIYKQMPGCFNFLRKKLFFKTS

SEQ ID NO: 3032 - DNA, 2811 bp, Artificial Sequence
  source: /note="Description of Artificial Sequence: Synthetic polynucleotide"
atggccttaccagtgaccgccttgctcctgccgctggccttgctgctccacgccgccaggccgggatcccggggcgtgcaggttgagacaatttccccaggagatgggcgaacgttccccaagcgcggacagacatgcgttgtgcactacacaggaatgttggaggacggaaagaaaatggacagttcaagagatcggaacaaaccattcaaattcatgttgggaaaacaggaagtgatacggggctgggaagagggtgtagcgcaaatgtccgttggtcaacgagcaaaactcacgataagtcccgattatgcttacggcgcaaccggtcacccgggcatcataccgcctcatgcgactttggtctttgatgtggagctgttgaaacttgaaactcgcggagtacaggttgaaacaatatcacccggggacgggcggacttttccgaagagaggtcagacctgcgtcgtccattataccggtatgctggaggacggaaagaaaatggacagctcacgggaccgaaataaaccattcaaatttatgttggggaaacaagaggttatcaggggctgggaggagggtgtggcccagatgtctgtcggtcagcgcgcgaaactcacaatctctccggattatgcgtatggggcgacagggcatccgggaattatccctccccacgctaccttggttttcgatgttgagcttctgaagttggagaccagaggagttcaagtggagacaatatctcctggggatggacggacgttccccaagcgcggccagacctgtgtagtccactacacagggatgcttgaagacggaaaaaagatggatagcagtagagatcgcaacaaaccatttaagttcatgctggggaagcaggaagtaatacgcggctgggaggaaggcgtggcacagatgagtgttggtcaacgggccaaacttactatttctcccgattatgcgtatggagccaccgggcaccctggcattatcccaccccatgccacattggtttttgacgttgaattgcttaaattggagaccaggggagtccaagtggaaacaatatcaccgggggatggtcggacttttcctaaaaggggccaaacctgtgtagtccattataccggaatgctcgaagacggaaagaaaatggactcttctagagaccgcaataagcccttcaagttcatgttgggtaagcaagaggtgatccggggctgggaagagggggtcgctcaaatgtccgtcggtcagcgagctaaactgactatttccccagactacgcatatggagcgactggccaccccggtattattcctccccatgcgactctcgtgttcgacgtagaactcttgaaattggaaacgtcagcccggaacaggcggaagagagatattcaacttacacagtcccctagttccttgtccgcctccgtcggcgacagagttaccatgacttgtcgagcgtcttctagcgtttcctacattcattggttccaacagaagcccggaaaggcaccaaaaccttggatctacgccacgtccaatttggctagtggtgttccggtgcgattttccgggtcaggtagcgggacggactatacttttaccatttcaagccttcagcctgaagacatcgcgacgtactattgtcagcagtggacctctaaccctcctacctttggcggtggaacaaagctggagatcaaacgaggcgggggtggctctgggggaggaggttccggtgggggaggctctcaagtacaactgcaacaaagtggggctgaagtgaagaagcccggttcttcagtcaaagtatcatgtaaggcaagtggttatacttttacgtcttataacatgcattgggtaaagcaagcccctggtcagggcctcgagtggattggtgcgatctaccctggaatgggtgatacgagctataatcagaaattcaaggggaaagccaccttgactgcagacgaatctacgaacacggcttacatggagcttagctcactcagatcagaggatacagccttttactactgcgctagatcaacttattacggaggagactggtattttgatgtatggggtcaggggaccacagtcactgttagctctgctagcaccacgacgccagcgccgcgaccaccaacaccggcgcccaccatcgcgtcgcagcccctgtccctgcgcccagaggcgtgccggccagcggcggggggcgcagtgcacacgagggggctggacttcgcctgtgattccggaatctacatctgggcgcccttggccgggacttgtggggtccttctcctgtcactggttatcaccctttactgcaaacggggcagaaagaaactcctgtatatattcaaacaaccatttatgagaccagtacaaactactcaagaggaagatggctgtagctgccgatttccagaagaagaagaaggaggatgtgaactgagagtgaagttcagcaggagcgcagacgcccccgcgtaccagcagggccagaaccagctctataacgagctcaatctaggacgaagagaggagtacgatgttttggacaagagacgtggccgggaccctgagatggggggaaagccgagaaggaagaaccctcaggaaggcctgtacaatgaactgcagaaagataagatggcggaggcctacagtgagattgggatgaaaggcgagcgccggaggggcaaggggcacgatggcctttaccagggtctcagtacagccaccaaggacacctacgacgcccttcacatgcaggccctgccccctcgc

SEQ ID NO: 3033 - protein, 939 aa, Artificial Sequence
  source: /note="Description of Artificial Sequence: Synthetic polypeptide"
MALPVTALLLPLALLLHAARPGSRGVQVETISPGDGRTFPKRGQTCVVHYTGMLEDGKKMDSSRDRNKPFKFMLGKQEVIRGWEEGVAQMSVGQRAKLTISPDYAYGATGHPGIIPPHATLVFDVELLKLETRGVQVETISPGDGRTFPKRGQTCVVHYTGMLEDGKKMDSSRDRNKPFKFMLGKQEVIRGWEEGVAQMSVGQRAKLTISPDYAYGATGHPGIIPPHATLVFDVELLKLETRGVQVETISPGDGRTFPKRGQTCVVHYTGMLEDGKKMDSSRDRNKPFKFMLGKQEVIRGWEEGVAQMSVGQRAKLTISPDYAYGATGHPGIIPPHATLVFDVELLKLETRGVQVETISPGDGRTFPKRGQTCVVHYTGMLEDGKKMDSSRDRNKPFKFMLGKQEVIRGWEEGVAQMSVGQRAKLTISPDYAYGATGHPGIIPPHATLVFDVELLKLETSARNRRKRGSDIQLTQSPSSLSASVGDRVTMTCRASSSVSYIHWFQQKPGKAPKPWIYATSNLASGVPVRFSGSGSGTDYTFTISSLQPEDIATYYCQQWTSNPPTFGGGTKLEIKRGGGGSGGGGSGGGGSQVQLQQSGAEVKKPGSSVKVSCKASGYTFTSYNMHWVKQAPGQGLEWIGAIYPGMGDTSYNQKFKGKATLTADESTNTAYMELSSLRSEDTAFYYCARSTYYGGDWYFDVWGQGTTVTVSSASTTTPAPRPPTPAPTIASQPLSLRPEACRPAAGGAVHTRGLDFACDSGIYIWAPLAGTCGVLLLSLVITLYCKRGRKKLLYIFKQPFMRPVQTTQEEDGCSCRFPEEEEGGCELRVKFSRSADAPAYQQGQNQLYNELNLGRREEYDVLDKRRGRDPEMGGKPRRKNPQEGLYNELQKDKMAEAYSEIGMKGERRRGKGHDGLYQGLSTATKDTYDALHMQALPPR

SEQ ID NO: 3034 - DNA, 63 bp, Artificial Sequence
  source: /note="Description of Artificial Sequence: Synthetic oligonucleotide"
atggccttaccagtgaccgccttgctcctgccgctggccttgctgctccacgccgccaggccg

SEQ ID NO: 3035 - protein, 21 aa, Artificial Sequence
  source: /note="Description of Artificial Sequence: Synthetic peptide"
MALPVTALLLPLALLLHAARP

SEQ ID NO: 3036 - protein, 5 aa, Artificial Sequence
  source: /note="Description of Artificial Sequence: Synthetic peptide"
SGGGS
